(19) United States
(12) Patent Application Publication
(10) Pub. No.: US 2007/0054262 A1
(43) Pub. Date: Mar. 8, 2007

(54) Methods of identifying optimal variants of peptide epitopes

(76) Inventors: Denise M. Baker, Poway, CA (US); Brian D. Livingston, San Diego, CA (US); Robert W. Chesnut, Cardiff-by-the-Sea, CA (US); Alessandro Sette, La Jolla, CA (US); Mark J. Newman, Carlsbad, CA (US)

Correspondence Address: STERNE, KESSLER, GOLDSTEIN & FOX, P.L.L.C., 1100 NEW YORK AVE., WASHINGTON, DC, 20005, US

(21) Appl. No.: 10/551,209

(22) PCT Filed: Mar. 29, 2004
(86) PCT No.: PCT/US04/09510

§ 371 Date: Sep. 28, 2005

Related U.S. Application Data
(60) Provisional application No. 60/458,026, filed on Mar. 28, 2003.

(51) Int. Cl. C12Q 1/70; G01N 33/569; G01N 33/554; G01N 33/53

(52) U.S. Cl. 435/5; 435/7.22; 435/7.31; 435/7.32

(57) ABSTRACT

The present invention is directed to methods for selecting a variant of a peptide epitope which induces a CTL response against another variant(s) of the peptide epitope, by determining whether the variant comprises only conserved residues, as defined herein, at non-anchor positions in comparison to the other variant(s). The present invention is also directed to variants identified by the methods above; peptides comprising such variants; nucleic acids encoding such variants and peptides; cells comprising such variants, and/or peptides, and/or nucleic acids; compositions comprising such variants, and/or peptides, and/or nucleic acids, and/or cells; as well as therapeutic and diagnostic methods for using such variants, peptides, nucleic acids, cells, and compositions.

### BACKGROUND OF THE INVENTION

[0001] 1. Field of the Invention

[0002] This invention relates to the field of biology. In a particular embodiment, it relates to peptides, polynucleotides, and compositions useful to monitor or elicit an immune response to selected antigens, and methods of identifying such peptides and polynucleotides.

[0003] 2. Related Art

[0004] HLA class I molecules are expressed on the surface of almost all nucleated cells. Following intracellular processing of antigens, epitopes from the antigens are presented as a complex with the HLA class I molecules on the surface of such cells. CTL recognize the peptide-HLA class I complex, which then results in the destruction of the cell bearing the HLA-peptide complex directly by the CTL and/or via the activation of non-destructive mechanisms e.g., the production of interferon, that inhibit viral replication.

[0005] Human Immunodeficiency Virus. Acquired immunodeficiency syndrome (AIDS) caused by infection with human immunodeficiency virus-1 (HIV-1) represents a major world health problem. Estimates indicate that about 16,000 people worldwide are infected with HIV each day.

[0006] The development of anti-viral drugs has been a major advancement in reducing viral loads in HIV infected patients. Highly active retroviral therapy (HAART) has been shown to reduce viremia to nearly undetectable levels. However, current drug therapies are not practicable as a long term solution to the HIV epidemic. HAART therapy is severely limited due to poor tolerance for the drugs and the emergence of drug-resistant virus. Moreover, replication competent HIV persists in the lymphoid tissue of patients who have responded to HAART, thus serving as a reservoir of virus. Lastly, current anti-retroviral drug therapies have little impact upon the global epidemic: almost 90% of the world's HIV infected population resides within countries lacking financial resources for these drugs. Thus, a need exists for an efficacious vaccine to both prevent and treat HIV infection.

[0007] Virus-specific, human leukocyte antigen (HLA) class I-restricted cytotoxic T lymphocytes (CTL) are known to play a major role in the prevention and clearance of virus infections in vivo (Oldstone et al., Nature 321:239, 1989; Jamieson et al., J. Virol. 61:3930, 1987; Yap et al, Nature 273:238, 1978; Lukacher et al., J. Exp. Med. 160:814, 1994; McMichael et al., N. Engl. J. Med. 309:13, 1983; Sethi et al., J. Gen. Virol. 64:443, 1983; Watari et al., J. Exp. Med. 165:459, 1987; Yasukawa et al., J. Immunol. 143:2051, 1989; Tigges et al., J. Virol. 66:1622, 1993; Reddenhase et al., J. Virol. 55:263, 1985; Quinnan et al., N. Engl. J. Med. 307:6, 1982).

[0008] While immune correlates of protective immunity against HIV infection are not well defined, there is a growing body of evidence that suggests CTL are important in controlling HIV infection. HIV-specific CTL responses can be detected early in infection and the appearance of the responses corresponds to the time in infection at which initial viremia is reduced (Pantaleo et al., Nature 370:463, 1994; Walker et al., Proc. Natl. Acad. Sci. 86:9514, 1989). In addition, HIV replication in infected lymphocytes can be inhibited by incubation with autologous CTL (see, e.g., Tsubota et al., J. Exp. Med. 169:1421, 1989). These data are supported by recent studies that indicate CTL are required for controlling viral replication in a SIV/rhesus animal model (Schmitz et al., Science 283:857, 1999), and additionally supported by studies that demonstrate that CTL exert selective pressure on HIV populations as evidenced by the eventual predominance of viruses with amino acid replacements in those regions of the virus to which CTL responses are directed (see, e.g., Borrow et al., Nature Med. 3:205-211, 1997; Price et al., Proc. Nat. Acad. Sci. 94:12890-1895, 1997; Koenig et al., Nature Med. 1:330-336, 1995; and Haas et al., J. Immunol. 157:4212-4221, 1996).

[0009] Virus-specific T helper lymphocytes are also known to be critical for maintaining effective immunity in chronic viral infections. Historically, HTL responses were viewed as primarily supporting the expansion of specific CTL and B cell populations; however, more recent data indicate that HTL may directly contribute to the control of virus replication. For example, a decline in CD4⁺ T cells and a corresponding loss in HTL function characterize infection with HIV (Lane et al., New Engl. J. Med. 313:79, 1985). Furthermore, studies in HIV infected patients have also shown that there is an inverse relationship between virus-specific HTL responses and viral load, suggesting that HTL play a role in viremia (see, e.g., Rosenberg et al., Science 278:1447, 1997).

[0010] A fundamental challenge in the development of an efficacious HIV vaccine is the heterogeneity observed in HIV. The virus, like some other infectious agents including retroviruses, rapidly mutates during replication resulting in the generation of virus that can escape anti-viral therapy and immune recognition (Borrow et al., Nature Med. 3:205, 1997). In addition, HIV can be classified into a variety of subtypes that exhibit significant sequence divergence (see, e.g., Lukashov et al., AIDS 12:S43, 1998). In view of the heterogeneous nature of HIV, and the heterogeneous immune response observed with HIV infection, induction of a multi-specific cellular immune response directed simultaneously against multiple HIV epitopes appears to be important for the development of an efficacious vaccine against HIV. There is a need to establish such vaccine embodiments which elicit immune responses of sufficient breadth and vigor to prevent and/or clear HIV infection.

[0011] Hepatitis B Virus. Chronic infection by hepatitis B virus (HBV) affects at least 5% of the world's population and is a major cause of cirrhosis and hepatocellular carcinoma (Hoofnagle, J., N. Engl. J. Med. 323:337, 1990; Fields, B. and Knipe, D., In: Fields Virology 2:2137, 1990). The World Health Organization lists hepatitis B as a leading cause of death worldwide, close behind chronic pulmonary disease, and more prevalent than AIDS. Chronic HBV infection can range from an asymptomatic carrier state to continuous hepatocellular necrosis and inflammation, and can lead to hepatocellular carcinoma.

[0012] The immune response to HBV is believed to play an important role in controlling hepatitis B infection. A variety of humoral and cellular responses to different regions of the HBV nucleocapsid core and surface antigens have been identified. T cell mediated immunity, particularly involving class I human leukocyte antigen-restricted cytotoxic T lymphocytes (CTL), is believed to be crucial in combatting established HBV infection.

[0013] Several studies have emphasized the association between self-limiting acute hepatitis and multispecific CTL responses (Penna, A. et al., J. Exp. Med. 174:1565, 1991; Nayersina, R. et al., J. Immunol. 150:4659, 1993). Spontaneous and interferon-related clearance of chronic HBV infection is also associated with the resurgence of a vigorous CTL response (Guidotti, L. G. et al., Proc. Natl. Acad. Sci. USA 91:3764, 1994). In all such cases the CTL responses are polyclonal, and specific for multiple viral proteins including the HBV envelope, core and polymerase antigens. By contrast, in patients with chronic hepatitis, the CTL activity is usually absent or weak, and antigenically restricted.

[0014] The crucial role of CTL in resolution of HBV infection has been further underscored by studies using HBV transgenic mice. Adoptive transfer of HBV-specific CTL into mice transgenic for the HBV genome resulted in suppression of virus replication. This effect was primarily mediated by a non-lytic, lymphokine-based mechanism (Guidotti, L. G. et al., Proc. Natl. Acad. Sci. USA 91:3764, 1994; Guidotti, L. G., Guilhot, S., and Chisari, F. V. J. Virol. 68:1265, 1994; Guidotti, L. G. et al., J. Virol. 69:6158, 1995; Gilles, P. N., Fey, G., and Chisari, F. V., J. Virol. 66:3955, 1992).

[0015] As is the case for HLA class I restricted responses, HLA class II restricted T cell responses are usually detected in patients with acute hepatitis, and are absent or weak in patients with chronic infection (Chisari, F. V. and Ferrari, C., Annu. Rev. Immunol. 13:29, 1995). HLA Class II responses are tied to activation of helper T cells (HTLs) Helper T lymphocytes, which recognize Class II HLA molecules, may directly contribute to the clearance of HBV infection through the secretion of cytokines which suppress viral replication (Franco, A. et al., J. Immunol. 159:2001, 1997). However, their primary role in disease resolution is believed to be mediated by inducing activation and expansion of virus-specific CTL and B cells.

[0016] In view of the heterogeneous immune response observed with HBV infection, induction of a multi-specific cellular immune response directed simultaneously against multiple epitopes appears to be important for the development of an efficacious vaccine against HBV. There is a need to establish vaccine embodiments that elicit immune responses that correspond to responses seen in patients that clear HBV infection. Epitope-based vaccines appear useful.

[0017] Hepatitis C Virus. Hepatitis C virus (HCV) infection is a global human health problem with approximately 150,000 new reported cases each year in the U.S. alone. HCV is a single stranded RNA virus, and is the etiological agent identified in most cases of non-A, non-B post-transfusion and post-transplant hepatitis, and is a common cause of acute sporadic hepatitis (Choo et al., Science 244:359, 1989; Kuo et al., Science 244:362, 1989; and Alter et al., in: Current Perspective in Hepatology, p. 83, 1989). It is estimated that more than 50% of patients infected with HCV become chronically infected and, of those, 20% develop cirrhosis of the liver within 20 years (Davis et al., New Engl. J. Med. 321:1501, 1989; Alter et al., in: Current Perspective in Hepatology, p. 83, 1989; Alter et al., New Engl. J. Med. 327:1899, 1992; and Dienstag, J. L. Gastroenterology 85:430, 1983). Moreover, the only therapy available for treatment of HCV infection is interferon-α. Most patients are unresponsive, however, and among the responders, there is a high recurrence rate within 6-12 months of cessation of treatment (Liang et al., J. Med. Virol. 40:69, 1993). Ribaviron, a guanosine analog with a broad spectrum activity against many RNA and DNA viruses, has been shown in clinical trials to be effective against chronic HCV infection when used in combination with interferon-α (see, e.g. Poynard et al., Lancet 352:1426-1432, 1998; Reichard et al., Lancet 351:83-87, 1998) However, the response rate is still well below 50%.

[0018] Virus-specific, human leukocyte antigen (HLA) class I-restricted cytotoxic T lymphocytes (CTL) are known to play a major role in the prevention and clearance of virus infections in vivo (Oldstone et al., Nature 321:239, 1989; Jamieson et al., J. Virol. 61:3930, 1987; Yap et al, Nature 273:238, 1978; Lukacher et al., J. Exp. Med. 160:814, 1994; McMichael et al., N. Engl. J. Med. 309:13, 1983; Sethi et al., J. Gen. Virol. 64:443, 1983; Watari et al., J. Exp. Med. 165:459, 1987; Yasukawa et al., J. Immunol. 143:2051, 1989; Tigges et al., J. Virol. 66:1622, 1993; Reddenhase et al., J. Virol. 55:263, 1985; Quinnan et al., N. Engl. J. Med. 307:6, 1982).

[0019] In view of the heterogeneous immune response observed with HCV infection, induction of a multi-specific cellular immune response directed simultaneously against multiple HCV epitopes appears to be important for the development of an efficacious vaccine against HCV. There is a need, however, to establish vaccine embodiments that elicit immune responses that correspond to responses seen in patients that clear HCV infection.

[0020] Human Papillomavirus. Human papillomavirus (HPV) is a member of the papillomaviridae, a group of small DNA viruses that infect a variety of higher vertebrates. More than 80 types of HPVs have been identified. Of these, more than 30 can infect the genital tract. Some types, generally types 6 and 11, may cause genital warts, which are typically benign and rarely develop into cancer. Other strains of HPV, “cancer-associated”, or “high-risk” types, can more frequently lead to the development of cancer. The primary mode of transmission of these strains of HPV is through sexual contact.

[0021] The main manifestations of the genital warts are cauliflower-like condylomata acuminata that usually involve moist surfaces; keratotic and smooth papular warts, usually on dry surfaces; and subclinical “flat” warts, which are found on any mucosal or cutaneous surface (Handsfield, H., Am. J. Med. 102(5A):16-20, 1997). These warts are typically benign but are a source of inter-individual spread of the virus (Ponten, J. & Guo, Z., Cancer Surv. 32:201-29, 1998). At least three HPV strains associated with genital warts have been identified: type 6a (see, e.g., Hofmann, K. J., et al., Virology 209(2):506-518, 1995), type 6b (see, e.g., Hofmann et al., supra) and type 11 (see, e.g., Dartmann, K. et al., Virology 151(1):124-130, 1986).

[0022] Cancer-associated HPVs have been linked with cancer in both men and women; they include, but are not limited to, HPV-16, HPV-18, HPV-31, HPV-45, HPV-33 and HPV-56. Other HPV strains, including types 6 and 11 as well as others, e.g., HPV-5 and HPV-8, are less frequently associated with cancer. The high risk types are typically associated with the development of cervical carcinoma and premalignant lesions of the cervix in women, but are also associated with similar malignant and premalignant lesions at other anatomic sites within the lower genital or anogenital tract. These lesions include neoplasia of the vagina, vulva, perineum, the penis, and the anus. HPV infection has also been associated with respiratory tract papillomas, and rarely, cancer, as well as abnormal growth or neoplasia in other epithelial tissues. See, e.g. VIROLOGY, 2^{ND} ED, Fields et al., Eds. Raven Press, New York, 1990, Chapters 58 and 59, for a review of HPV association with cancer.

[0023] The HPV genome consists of three functional regions, the early region, the late region, and the “long control region”. The early region gene products control viral replication, transcription and cellular transformation They include the HPV E1 and E2 proteins, which play a role in HPV DNA replication, and the E6 and E7 oncoproteins, which are involved in the control of cellular proliferation. The late region include the genes that encode the structural proteins L1 and L2, which are the major and minor capsid proteins, respectively. The “long control region” contains such sequences as enhancer and promoter regulatory regions.

[0024] HPV expresses different proteins at different stages of the infection, for example early, as well as late, proteins. Even in latent infections, however, early proteins are often expressed and are therefore useful targets for vaccine-based therapies. For example, high-grade dysplasia and cervical squamous cell carcinoma continue to express E6 and E7, which therefore can be targeted to treat disease at both early and late stages of infection.

[0025] Treatment for HPV infection is often unsatisfactory because of persistence of virus after treatment and recurrence of clinically apparent disease is common. The treatment may require frequent visits to clinics and is not directed at elimination of the virus but at clearing warts. Because of persistence of virus after treatment, recurrence of clinically apparent disease is common.

[0026] Thus, a need exists for an efficacious vaccine to both prevent and treat HPV infection and to treat cancer that is associated with HPV infection. Effective HPV vaccines would be a significant advance in the control of sexually transmissable infections and could also protect against clinical disease, particularly cancers such as cervical cancer. (see, e.g., Rowen, P. & Lacey, C., Dermatologic Clinics 16(4):835-838, 1998).

[0027] Virus-specific, human leukocyte antigen (HLA) class I-restricted cytotoxic T lymphocytes (CTL) are known to play a major role in the prevention and clearance of virus infections in vivo (Oldstone et al., Nature 321:239, 1989; Jamieson et al., J. Virol. 61:3930, 1987; Yap et al, Nature 273:238, 1978; Lukacher et al., J. Exp. Med. 160:814, 1994; McMichael et al., N. Engl. J. Med. 309:13, 1983; Sethi et al., J. Gen. Virol. 64:443, 1983; Watari et al., J. Exp. Med. 165:459, 1987; Yasukawa et al., J. Immunol. 143:2051, 1989; Tigges et al., J. Virol. 66:1622, 1993; Reddenhase et al., J. Virol. 55:263, 1985; Quinnan et al., N. Engl. J. Med. 307:6, 1982).

[0028] Virus-specific T helper lymphocytes are also known to be critical for maintaining effective immunity in chronic viral infections. Historically, HTL responses were viewed as primarily supporting the expansion of specific CTL and B cell populations; however, more recent data indicate that HTL may directly contribute to the control of virus replication. For example, a decline in CD4⁺ T cells and a corresponding loss in HTL function characterize infection with HIV (Lane et al., New Engl. J. Med. 313:79, 1985). Furthermore, studies in HIV infected patients have also shown that there is an inverse relationship between virus-specific HTL responses and viral load, suggesting that HTL plays a role in viremia (see, e.g., Rosenberg et al., Science 278:1447, 1997).

[0029] The development of vaccines with prophylactic and therapeutic efficacy against HPV is ongoing. Early vaccine development was hampered by the inability to culture HPV. With the introduction of cloning techniques and protein expression, however, some attempts have been made to stimulate humoral and CTL response to HPV (See, e.g., Rowen, P. & Lacey, C., Dermatologic Clinics 16(4):835-838 (1998)). Studies to date, however, have been inconclusive.

[0030] Activation of T helper cells and cytotoxic lymphocytes (CTLs) in the development of vaccines has also been analyzed. Lehtinen, M., et al. for instance, has shown that some peptides from the E2 protein of HPV type 16 activate T helper cells and CTLs (Biochem. Biophys. Res. Commun. 209(2):541-6 (1995). Similarly, Tarpey et al, has shown that some peptides from HPV type 11 E7 protein can stimulate human HPV-specific CTLs in vitro (Immunology 81:222-227 (1994)) and Borysiewicz et al. have reported a recombinant vaccinia virus expressing HPV 16 and HPV 17 E6 and E7 that stimulated CTL responses in at least one patient (Lancet 347:1347-1357, 1996).

[0031] Plasmodium falciparum and Malaria. Malaria, which is caused by infection with the parasite Plasmodium falciparum (PF), represents a major world health problem. Approximately 500 million people in the world are at risk from the disease, with approximately 200 million people actually harboring the parasites. An estimated 1 to 2 million deaths occur each year due to malaria. (Miller et al., Science 234:1349, 1986).

[0032] Fatal outcomes are not confined to first infections, and constant exposure is apparently a prerequisite for maintaining immunity. Naturally acquired sterile immunity is rare, if it exists at all. Accordingly, major efforts to develop an efficacious malaria vaccine have been undertaken.

[0033] Human volunteers injected with irradiated PF sporozoites are resistant to subsequent sporozoite challenges, which demonstrates that development of a malaria vaccine is indeed immunologically feasible. Furthermore, these immune individuals developed a vigorous response, including antibodies, and cytotoxic T lymphocyte (CTL) and helper T lymphocyte (HTL) components, directed against multiple antigens. Reproducing the breadth and multiplicity of this response in a vaccine, however, is a task of large proportions. The epitope approach, as described herein, may represent a solution to this challenge, in that it allows the incorporation of various antibody, CTL and HTL epitopes, from various proteins, in a single vaccine composition.

[0034] Anti-sporozoite antibodies are by themselves, in general, not completely efficacious in clearing the infection (Egan et al., Science 236:453, 1987). However, high concentrations of antibodies directed against the repeated region of the major B cell antigen of the sporozoite/circumsporozoite protein (CSP) have been shown to prevent liver cell infection in certain experimental models (Egan et al., Science 236:453, 1987; Potocnjak, P. et al., Science 207:71, 1980). The present inventors have shown that constructs encompassing CSP-repeat B cell epitopes and the optimized helper epitope PADRE™ (San Diego, Calif.) are highly immunogenic, and can protect in vitro against sporozoite invasion in both mouse and human liver cells, and protect mice in vivo against live sporozoite challenge (Franke et al., Vaccine 17:1201-1205, 1999)

[0035] PF-specific CD4⁺ T cells also have a role in malarial immunity beyond providing help for B cell and CTL responses. Experiments by Renia et al. (Renia, et al., Proc. Natl. Acad. Sci. USA 88:7963, 1991) demonstrated that HTLs directed against the Plasmodium yoelli CS protein could in fact adoptivley transfer protection against malaria.

[0036] Considerable data implicate CTLs in protection against pre-erythrocytic-stage malaria. CD8⁺ CTLs can eliminate Plasmodium berghei- or Plasmodium yoelii-infected mouse hepatocytes from in vitro culture in a major histocompatibility complex (MHC)-restricted and antigen-restricted manner (Hoffman et al,, Science 244:1078-1081, 1989; Weiss et al., J. Exp. Med. 171:763-773, 1990). Further, it has also been shown that the immunity that developed in mice vaccinated with irradiated sporozoites is also dependent upon the present of CD8+ T cells. These T cells accumulate in inflammatory liver infiltrates subsequent to challenge. Passive transfer of circumsporozoite (CSP)-specific CTL clones as long as three hours after inoculation of sporozoites (i.e., after the parasites have left the bloodstream and infected liver cells) were capable of protecting animals against infection (Romero et al., Nature 341:323, 1989).

[0037] It is notable that CTL-restricted responses directed against a single antigen are insufficient to protect mice with different MHC alleles, and a combination of multiple antigens was required even to protect mice from the most common laboratory strains of Plasmodium. These data indicate that a combination of epitopes form several antigens is necessary to elicit a protective CTL response.

[0038] Indirect evidence that CTLs are important in protective immunity against Pf in humans has also accumulated. It has been reported that cytotoxic CD8⁺ T cells can be identified in humans immunized with PF sporozoites (Moreno, et al., Int. Immunol. 3:997, 1991). Further, humans immunized with irradiated sporozoites or naturally exposed to malaria can generate a CTL response to the pre-erythrocytic-stage antigens, CSP, sporozoite surface protein 2 (SSP2), liver-stage antigen-1 (LSA-1), and exported protein-1 (Exp-1) (see, e.g. Malik et al., Proc. Natl. Acad. Sci. USA 88, 3300-3304, 1991; Doolan et al., Int. Immunol. 3:511-516, 1991; Hill et al., Nature 360:434-439, 1992). Additionally, there is evidence that the polymorphism within the CSP may be the result of selection by CTLs of parasites that express variant forms (MCutchan and Water, Immunol. Lett. 25:23-26, 1990). This is based on the observation that the variation is nonsynonymous at the nucleotide level, thereby indicating selective pressure at the protein level. The polymorphism primarily maps to identified CTL and T helper epitopes (Doolan et al., Int. Immunol. 5:2746, 1993); and CTL responses to some of the parasite variants do not cross-react (Hill et al., supra). Finally, the MHC class I human leukocyte antigen (HLA)-Bw53 has been associated with resistance to severe malaria in The Gambia, and CTLs to a conserved epitope restricted by the HLA-Bw53 allele have been identified on P. falciparum LSA-1 (Hill et al., Nature 352:595-600, 1991; Hill et al., Nature 340:434-439, 1992). Since HLA-Bw53 is found in 15%-40% of the population of sub-Saharan Africa but in less than 1% of Caucasians and Asians, these data suggest evolutionary selection on the basis of protection against severe malaria.

[0039] Thus, antibody, and both HLA class I and class II restricted responses directed against multiple sporozoite antigens appear to be involved in generating protective immunity to malaria. Furthermore, several important antigenic epitopes against which humoral and cellular immunity is focused have already been exactly delineated.

[0040] In view of the heterogeneous immune response observed with PF infection, induction of a multi-specific cellular immune response directed simultaneously against multiple PF epitopes appears to be important for the development of an efficacious vaccine against PF. There is a need, however, to establish vaccine embodiments that elicit immune responses that correspond to responses seen in patients that clear PF infection.

[0041] Epitope-Based Vaccines. The use of epitope-based vaccines has several advantages over current vaccines. The epitopes for inclusion in such a vaccine are to be selected from conserved regions of viral or tumor-associated antigens, in order to reduce the likelihood of escape mutants. The advantage of an epitope-based approach over the use of whole antigens is that there is evidence that the immune response to whole antigens is directed largely toward variable regions of the antigen, allowing for immune escape due to mutations. Furthermore, immunosuppressive epitopes that may be present in whole antigens can be avoided with the use of epitope-based vaccines.

[0042] Additionally, with an epitope-based vaccine approach, there is an ability to combine selected epitopes (CTL and HTL) and additionally to modify the composition of the epitopes, achieving, for example, enhanced immunogenicity. Accordingly, the immune response can be modulated, as appropriate, for the target disease. Similar engineering of the response is not possible with traditional approaches.

[0043] Another major benefit of epitope-based immune-stimulating vaccines is their safety. The possible pathological side effects caused by infectious agents or whole protein antigens, which might have their own intrinsic biological activity, is eliminated.

[0044] An epitope-based vaccine also provides the ability to direct and focus an immune response to multiple selected antigens from the same pathogen. Thus, patient-by-patient variability in the immune response to a particular pathogen may be alleviated by inclusion of epitopes from multiple antigens from that pathogen in a vaccine composition. A “pathogen” may be an infectious agent or a tumor associated molecule.

[0045] One of the most formidable obstacles to the development of broadly efficacious epitope-based immunotherapeutics has been the extreme polymorphism of HLA molecules. In the past, effective non-genetically biased coverage of a population has been a task of considerable complexity; such coverage has required that epitopes be used specific for HLA molecules corresponding to each individual HLA allele. Therefore, impractically large numbers of epitopes would been required in order to cover ethnically diverse populations. Recently, methods have been developed that allow the identification of epitopes that bind multiple HLA molecules. Therefore, epitope-based vaccines can be designed that contain epitopes which, either individually or in combination, bind a greater number of HLA molecules. The resulting epitope-based vaccines have a greater breadth of population coverage across one or more continents and even worldwide.

[0046] Variation in Epitopes of Infectious Agents. A challenge in the development of effective vaccines against infectious agents such as hepatitis B virus (HBV) (47, 60) hepatitis C virus (HCV) (61-63), human papilloma virus (HPV) (64, 65) Plasmodium falciparum (66), and human immunodeficiency virus (HIV-1) is the protein sequence variation associated with different isolates. This variation is the result of gene sequence mutations. When such mutations occur in regions encoding epitopes recognized by cytotoxic T-lymphocytes (CTL), they provide a mechanism for escape of the agent from immune system control.

[0047] HIV-1 represents an infectious agent with an especially high frequency of sequence variation. The sequence variation associated with HIV-1 proteins from related isolates, members of the same clades or types, as well as unrelated isolates, is well documented (1). Viral escape from CTL induced as the result of natural infection or vaccines was documented in nonhuman primate models where the mechanism behind this escape was mutation of the primary anchor residues in dominant CTL epitopes (5-9). Viral escape from HIV-specific CTL has also been strongly implied by data obtained from HIV-1 infected individuals whose disease status change, including the transition from acute to chronic infection (10, 11), loss of stable control of viral replication and subsequent progression to AIDS (4, 12) or mother-to-child transmission (13). Thus, HIV-1 genetic and protein sequence variation represent a significant challenge to immune system-based control of viral replication, both within infected individuals and within populations.

[0048] While the public health need for a vaccine against HIV-1 is well recognized and accepted, the genetic variation of HIV-1 isolates represents a highly significant obstacle (1, 14-16). Several strategies have been proposed, some of which include:
[0049] (1) Designing vaccines on HIV-1 types prevalent within small, well defined populations or geographical regions, such as individual countries or regions, and producing multiple different vaccines for exclusive use within these countries or regions (16).
[0050] (2) Use of HIV-1 ancestral or consensus sequences based on HIV types present in larger target populations, such as groups of neighboring countries or continents (15, 17-19).
[0051] (3) Incorporation of viral gene products obtained from multiple different virus isolates, representing diversely different types or clades, into a single ‘multi-valent’ vaccine.

[0052] Related vaccine design concepts that incorporate many of the advantages associated with the approaches described above are the use of highly conserved regions or epitopes derived from these regions as the basis of the vaccine. The logic behind this approach is that conserved regions of the viral genome are those that have been maintained through the evolution of HIV-1 because changes impact gene product function and general viral fitness. This theory is consistent with analyses of HIV-1 protein sequence data which demonstrated that CTL epitopes are concentrated in conserved regions and that regions devoid of CTL epitopes are the most variable (20). Additional support comes from published reports describing CTL responses, induced as the result of natural infection or vaccination, that recognize viral proteins or epitopes common to viral isolates from diverse types or clades (21-26). Broad function CTL responses are also known to be correlated with slower progression to AIDS, at least for certain carefully studied populations (27, 28). Despite these reports and the clustering of CTL epitopes in conserved regions of HIV-1 gene products, amino acid sequence variation of analogous regions and epitopes from different viral isolates, both within the same type or lade and from different types, remains significant. There are currently no rules guiding the selection of conserved regions of CTL epitopes for use in vaccines other than the use of amino acid sequence identity (29).

[0053] A clear understanding of how CTL recognize pathogen infected cells has emerged over the past decade. It is now well established that small fragments of pathogen-derived proteins are generated, defined as peptide epitopes generally 8-11 amino acids in length, which bind to HLA-A, -B, or -C (human Class I Major Histocompatability Molecules) molecules expressed on the cell surface. Sequencing of naturally processed peptides bound to HLA molecules provided a means to identify the amino acid residues required for allele-specific epitope-peptide binding (30-32). Data obtained from X-ray crystallographic analysis of HLA-epitope peptide complexes, allowed for the identification and structural characterization of ‘binding pockets’ within the peptide binding cleft of HLA molecules. More refined epitope anchor motif definitions were then developed using data obtained from in vitro peptide-MHC binding assays. It is now well known that the main anchor residues typically occur at position 2 and the carboxyl terminus of peptides 8-11 amino acids in length, thus positions 8, 9, 10 or 11 (33-40). The definition of epitope peptide binding anchor motifs is the key to most, if not all, epitope prediction methods.

[0054] Initial CTL epitope identification methods were developed using common HLA alleles, such as HLA-A2.1. Motifs defined using different HLA molecules were found to be similar and this lead to the definition of HLA supertype families (41). The biological effect of this supertype relationship was first demonstrated for HIV-1 epitopes in a study where the HLA-A3 and -A11 epitope peptide binding patterns repertoires were demonstrated to be overlapping, not only with each other but also with HLA-A31, -A33 and -A*6801 (42). This binding specificity was defined as the HLA-A3 supertype. A significant overlap in peptide binding patterns was also demonstrated amongst several serologically distant HLA-B alleles (43, 44), and multiple HLA-A2 alleles (45, 46), resulting in the definition of the HLA-B7 and HLA-A2 supertype families. Recognition of epitopes by CTL in a supertype manner has since been demonstrated to occur naturally in infectious diseases and cancer (47-53).

[0055] While only two positions within CTL epitopes are typically characterized as the primary binding anchor positions, the amino acids that can serve as the anchor residues are more variable. The preferred and tolerated amino acids that can serve as anchor residues for the HLA-A2, -A3 and -B7 supertype families of epitopes are listed in Table 1. It is possible for analogous HIV-1 epitope peptides derived from different isolates, which differ with respect to the amino acids used as anchor residues, to bind to HLA molecules similarly. This type of variation can be as conserved since it is likely that CTL produced against one epitope would recognize the related epitope. Thus, variation limited to changes in anchor residues that result in sufficient epitope peptide binding to HLA molecules does not result in immune escape from CTL. Epitopes that contain this type of variation can be identified using the appropriately designed motif search algorithms.

[0056] The TCR of CTL has been reported to be somewhat flexible or promiscuous with respect to recognition of epitope peptides bound to HLA molecules. For HIV-1, this flexibility was demonstrated as CTL recognition of related, but slightly variable, epitopes by single clones of CTL produced following natural infection (54, 55). Similar flexibility of CTL epitope recognition was demonstrated using rhesus macaques and natural infection with SIV or immunization (56, 57). This observation is not unique to HIV-1 and SIV but rather the TCR appears to have evolved to allow promiscuous recognition of peptide epitope bound to MHC molecules (58).

[0057] Selective replacement of certain amino acids in CTL epitope peptides, amino acids thought to represent TCR contact points, is not only tolerated but can increase the recognition of the epitopes by CTL clones (59). The types of amino acid substitutions that can be incorporated, typically amino acids that are similar in chemical properties are best tolerated, and their positions, independent of primary anchor positions, within a selected number of CTL epitopes from tumor associated antigens were also defined.

[0058] For HIV-1 and other infectious agents, reproducible methods for predicting the CTL recognition of related variant epitopes that occur amongst isolates have not been developed. Nor have methods for identifying CTL epitopes that are most likely to induce broadly functional responses when used in vaccine. Thus, there exists a need to develop such methods to overcome the challenge associated with protein sequence variation in HIV and other infectious agents.
[0059] 1. Åsjö, B., et al. AIDS 11:A17-A36. 1997.
[0060] 2. Phillips, R. E., et al. Nature 354:453-459. 1991.
[0061] 3. Phillips, R. E., et al. Chem. Immunol. 56:150-164. 1993.
[0062] 4. McMichael, A. J., et al. Annu. Rev. Immunol. 15:271-296. 1997.
[0063] 5. Allen, T. M., et al. Nature 407:386-390. 2000.
[0064] 6. Barouch, D. H., et al. Nature 415:335-339. 2002.
[0065] 7. Evans, D. T., et al. Nat. Med. 5:1270-1276. 1999.
[0066] 8. Vogel, T. U., et al. J. Virol. 76:11623-11636. 2002.
[0067] 9. Nacsa, J., et al. Virology 305:210-218. 2003.
[0068] 10. Borrow, P., et al. Nat. Med. 3:205-211. 1997.
[0069] 11. Price, D. A., et al. Proc. Natl. Acad. Sci. U.S.A 94:1890-1895. 1997.
[0070] 12. Goulder, P. J., et al. Nat. Med. 3:212-217. 1997.
[0071] 13. Goulder, P. J., et al. Immunol. Lett. 79:109-116. 2001.
[0072] 14. Walker, B. D. et al. Nat. Immunol. 2:473-475. 2001.
[0073] 15. Korber, B., et al. Br. Med. Bull. 58:19-42. 2001.
[0074] 16. Gaschen, B., et al. Science 296:2354-2360. 2002.
[0075] 17. Novitsky, V., et al. J. Virol. 76:5435-5451. 2002.
[0076] 18. Davis, N. L., et al. IUBMB. Life 53:209-211. 2002.
[0077] 19. Ellenberger, D. L., et al. Virology 302:155-163. 2002.
[0078] 20. Yusim, K., et al. J. Virol. 76:8757-8768. 2002.
[0079] 21. Ferrari, G., et al. Proc. Natl. Acad. Sci. U.S.A. 94:1396-1401. 1997.
[0080] 22. Fukada, K., et al. AIDS 16:701-711. 2002.
[0081] 23. Ferrari, G., et al. AIDS Res. Hum. Retroviruses 16:1433-1443. 2000.
[0082] 24. Buseyne, F., et al. Virology 250:316-324. 1998.
[0083] 25. Lynch, J. A., et al. J. Infect. Dis. 178:1040-1046. 1998.
[0084] 26. Wilson, S. E., et al. AIDS Res. Hum. Retroviruses 14:925-937. 1998.
[0085] 27. Rowland-Jones, S. L., et al. Immunol. Lett. 66:9-14. 1999.
[0086] 28. Gillespie, G. M., et al. AIDS 16:961-972. 2002.
[0087] 29. Altfeld, M. A., et al. J. Virol. 75:1301-1311. 2001.
[0088] 30. Sette, A. et al. Curr. Opin. Immunol. 4:79-86. 1992.
[0089] 31. Sinigaglia, F. et al. Curr. Opin. Immunol. 6:52-56. 1994.
[0090] 32. Engelhard, V. H. Curr. Opin. Immunol. 6:13-23. 1994.
[0091] 33. Brown, K., et al. Nature 364:33-39. 1994.
[0092] 34. Guo, H. C., et al. Proc. Natl. Acad. Sci. U.S.A. 90:8053-8057. 1993.
[0093] 35. Guo, H. C., et al. Nature 360:364-366. 1992.
[0094] 36. Silver, M. L., et al. Nature 360:367-369. 1992.
[0095] 37. Matsumura, M., et al. Science 257:927-934. 1992.
[0096] 38. Madden, D. R., et al. Cell 70:1035-1048. 1995.
[0097] 39. Fremont, D. H., et al. Science 257:919-927. 1992.
[0098] 40. Sapp, M., et al. J. Mol. Biol. 219:277-319. 1991.
[0099] 41. Kubo, R. T., et al. J. Immunol. 152:3913-24. 1994.
[0100] 42. Sidney, J., et al. Hum. Immunol. 45:79-93. 1996.
[0101] 43. Sidney, J., et al. J. Immunol. 154:247-259. 1995.
[0102] 44. Sidney, J., et al. J. Immunol 157:3480-3490. 1996.
[0103] 45. Del Guercio, M.-F., et al. J. Immunol. 154:685-693. 1995.
[0104] 46. Fruci, D., et al. Hum. Immunol. 38:187-192. 1993.
[0105] 47. Bertoni, R., et al. J. Clin. Invest. 100:503-513. 1997.
[0106] 48. Threlkeld, S. C., et al. J. Immunol. 159:1648-1657.
[0107] 49. Khanna, R., et al. J. Virol. 71:7429-7435. 1997.
[0108] 50. Bertoletti, A., et al. Hepatology 26:1027-1034. 1997.
[0109] 51. Fleischhauer, K., et al. J. Immunol. 157:787-297. 1996.
[0110] 52. Kawashima, I., et al. Hum. Immunol. 59:1-14. 1998.
[0111] 53. Wang, R. F., et al. J. Immunol. 160:890-897. 1998.
[0112] 54. Tomiyama, H., et al. J. Immunol. 30:2521-2530. 2000.
[0113] 55. Buseyne, F., et al. Int. Immunol. 13:941-950. 2001.
[0114] 56. Shen, L., et al. J. Immunol. 153:12-15-1994. 2000.
[0115] 57. Charini, W. A., et al. J. Immunol. 167:4996-5003. 2001.
[0116] 58. Mason, D. Immunol. Today. 19:395-404. 1998.
[0117] 59. Tangri, S., et al. J. Exp. Med. 194:833-846. 2001.
[0118] 60. Rehermann, B., et al. J. Exp. Med. 181:1047-1058. 1995.
[0119] 61. Chang, K. M., et al. J. Immunol. 162:1156-1164. 1999.
[0120] 62. Chang, K. M., et al. J. Clin. Invest. 100:2376-2385. 1997.
[0121] 63. Propato, A., et al. Hum. Immunol. 62:561-576. 2001.
[0122] 64. Kast, W. M., et al. J. Immunol. 152:3904-3912. 1994.
[0123] 65. Ressing, M. E., et al. J. Immunol. 154:5934-5943. 1995.
[0124] 66. Doolan, D. L., et al. Immunity. 7:97-112. 1997.

### SUMMARY OF THE INVENTION

[0125] The present invention is directed to methods for selecting a variant of a peptide epitope which induces a CTL response against another variant(s) of the peptide epitope, by determining whether the variant comprises only conserved residues, as defined herein, at non-anchor positions in comparison to the other variant(s).

[0126] In some embodiments, antigen sequences from a population of an infectious agent, said antigens comprising variants of a peptide epitope, are optionally aligned (manually or by computer) along their length, preferably their full length. Variant(s) of a peptide epitope (preferably naturally occurring variants), each 8-11 amino acids in length and comprising the same MHC class I supermotif or motif, are identified manually or with the aid of a computer. In some embodiments, a variant is optionally chosen which comprises preferred anchor residues of said motif and/or which occurs with high frequency within the population of variants. In other embodiments, a variant is randomly chosen. The randomly or otherwise chosen variant is compared to from one to all the remaining variant(s) to determine whether it comprises only conserved residues in the non-anchor positions relative to from one to all the remaining variant(s).

[0127] The present invention is also directed to variants identified by the methods above; peptides comprising such variants; nucleic acids encoding such variants and peptides; cells comprising such variants, and/or peptides, and/or nucleic acids; compositions comprising such variants, and/or peptides, and/or nucleic acids, and/or cells; as well as therapeutic and diagnostic methods for using such variants, peptides, nucleic acids, cells, and compositions.

### BRIEF DESCRIPTION OF THE DRAWINGS/FIGURES

[0128] FIGS. 1A-1E. Recognition of variant peptides by CTL generated against a single epitope. Variant peptides were identified from 167 HIV strains for 5 HIV epitopes, 3 HLA-A2 restricted (Env 134, A, Gag 386, B, and Vpr 62, C) and 2 HLA-A11 restricted (Pol 98, D, and Env 47, E). These are listed according to their relationship to a previously determined parent (P) into single anchor substitutions (A), single non-anchor substitutions (NA) or multiple substitutions (M). Binding of each variant peptide is also shown. The number of viral sequences containing each variant peptide is shown in the column labeled # Isolates, and is reported for the total sequences, Clade B sequences (B), and Clade C sequences (C). Finally, the ability of CTL primed against the parent peptide to recognize the variant peptides is shown in the bar graphs.

[0129] FIGS. 2A-2C. Characterization of the peptide-specific T cell lines. A. FACS analysis of the TCRs expressed by peptide-stimulated cells after 0, 1, and 5 peptide stimulations, using a panel of commercially available mAb for mouse TCR 2-14. B-C. Peptide affinity. Parent and variant peptides were titrated against CTL that had been stimulated 5 times with the parent peptide.

[0130] FIGS. 2A-2B. Recognition of a panel of variant peptides by PBL from an HIV-infected individual.

[0131] FIG. 4. Prediction of immunological conservation. Gag 271 variants and their binding are shown, along with the number of isolates that express each variant. Immunological recognition was predicted for each variant based on two different choices in the immunizing peptide. On the right, the immunogenicity for each variant is shown.

### DETAILED DESCRIPTION OF THE INVENTION

[0132] Definitions

[0133] The invention can be better understood with reference to the following definitions:

[0134] An “antigen” refers to a polypeptide encoded by the genome of an infectious agent, or other another source, but preferably an infectious agent in the present invention. Examples of HIV antigens include Env, Gag, Nef, Pol, Tat, Rev, Vif, Vpr, Vpu, p17, p24, p2, p7, p1, p6, Protease, RT, Integrase, and gp160 (preferably Env, Gag, Nef, Pol, Tat, Rev, Vif, Vpr, Vpu). Examples of HIV antigens include Core, Env, and Pol. Examples of HCV antigens include Core, E1, E2, Ns1, Ns2, Ns3, Ns4, and Ns5. Examples of HPV antigens include E1, E2, E3, E4, E5, E6, E7, L1, and L2. Examples of Plasmodium falciparum antigens include CSP, SSP2, Exp1, and LSA1.

[0135] Throughout this disclosure, “binding data” results are often expressed in terms of “IC₅₀'s.” IC₅₀ is the concentration of peptide in a binding assay at which 50% inhibition of binding of a reference peptide is observed. Given the conditions in which the assays are run (i.e., limiting HLA proteins and labeled peptide concentrations), these values approximate K_{D} values. Assays for determining binding are described in detail, e.g., in PCT publications WO 94/20127 and WO 94/03205, and other publications such Sidney et al., Current Protocols in Immunology 18.3.1 (1998); Sidney, et al., J. Immunol. 154:247 (1995); and Sette, et al., Mol. Immunol. 31:813 (1994). It should be noted that IC₅₀ values can change, often dramatically, if the assay conditions are varied, and depending on the particular reagents used (e.g., HLA preparation, etc.). For example, excessive concentrations of HLA molecules will increase the apparent measured IC₅₀ of a given ligand.

[0136] Alternatively, binding is expressed relative to a reference peptide. Although as a particular assay becomes more, or less, sensitive, the IC₅₀'s of the peptides tested may change somewhat, the binding relative to the reference peptide will not significantly change. For example, in an assay run under conditions such that the IC₅₀ of the reference peptide increases 10-fold, the IC₅₀ values of the test peptides will also shift approximately 10-fold. Therefore, to avoid ambiguities, the assessment of whether a peptide is a good (i.e. high), intermediate, weak, or negative binder is generally based on its IC₅₀, relative to the IC₅₀ of a standard peptide. The Tables included in this application present binding data in a preferred biologically relevant form of IC₅₀ nM.

[0137] Binding may also be determined using other assay systems including those using: live cells (e.g., Ceppellini et al., Nature 339:392 (1989); Christnick et al., Nature 352:67 (1991); Busch et al., Int. Immunol. 2:443 (1990); Hill et al., J. Immunol. 147:189 (1991); del Guercio et al., J. Immunol. 154:685 (1995)), cell free systems using detergent lysates (e.g., Cerundolo et al., J. Immunol. 21:2069 (1991)), immobilized purified MHC (e.g. Hill et al., J. Immunol. 152, 2890 (1994); Marshall et al., J. Immunol 152:4946 (1994)), ELISA systems (e.g., Reay et al., EMBO J. 11:2829 (1992)), surface plasmon resonance (e.g., Khilko et al., J. Biol. Chem. 268:15425 (1993)); high flux soluble phase assays (Hammer et al., J. Exp. Med. 180:2353 (1994)), and measurement of class I MHC stabilization or assembly (e.g., Ljunggren et al., Nature 346:476 (1990); Schumacher et al., Cell 62:563 (1990); Townsend et al., Cell 62:285 (1990); Parker et al., J. Immunol. 149:1896(1992)).

[0138] As used herein, “high affinity” with respect to HLA class I molecules is defined as binding with an IC₅₀ or K_{D} value, of 50 nM or less, “intermediate affinity” is binding with an IC₅₀ or K_{D} value of between 50 and about 500 nM, weak affinity is binding with an IC₅₀ or K_{D} value of between about 500 and about 5000 nM. “High affinity” with repect to binding to HLA class II molecules is defined as binding with an IC₅₀ or K_{D} value of 100 nM or less; “intermediate affinity” is binding with an IC₅₀ or K_{D} value of between about 100 and about 1000 nM.

[0139] A “computer” or “computer system” generally includes: a processor and related computer programs; at least one information storage/retrieval apparatus such as a hard drive, a disk drive or a tape drive; at least one input apparatus such as a keyboard, a mouse, a touch screen, or a microphone; and display structure, such as a screen or a printer. Additionally, the computer may include a communication channel in communication with a network. Such a computer may include more or less than what is listed above.

[0140] “Cross-reactive binding” indicates that a peptide is bound by more than one HLA molecule; a synonym is degenerate binding.

[0141] A “cryptic epitope” elicits a response by immunization with an isolated peptide, but the response is not cross-reactive in vitro when intact whole protein, which comprises the epitope, is used as an antigen.

[0142] The term “derived” when used to discuss an epitope is a synonym for “prepared.” A derived epitope can be isolated from a natural source, or it can be synthesized in accordance with standard protocols in the art. Synthetic epitopes can comprise artificial amino acids “amino acid mimetics,” such as D isomers of natural occurring L amino acids or non-natural amino acids such as cyclohexylalanine. A derived/prepared epitope can be an analog of a native epitope.

[0143] A “diluent” includes sterile liquids, such as water and oils, including those of petroleum, animal, vegetable or synthetic origin, such as peanut oil, soybean oil, mineral oil, sesame oil and the like. Water is a preferred diluent for pharmaceutical compositions. Saline solutions and aqueous dextrose and glycerol solutions can also be employed as diluents, particularly for injectable solutions.

[0144] A “dominant epitope” is an epitope that induces an immune response upon immunization with a whole native antigen (see, e.g., Sercarz, et al., Annu. Rev. Immunol 11:729-766, 1993). Such a response is cross-reactive in vitro with an isolated peptide epitope.

[0145] An “epitope” is the collective features of a molecule, such as primary, secondary and tertiary peptide structure, and charge, that together form a site recognized by an immunoglobulin, T cell receptor or HLA molecule. Alternatively, an epitope can be defined as a set of amino acid residues which is involved in recognition by a particular immunoglobulin, or in the context of T cells, those residues necessary for recognition by T cell receptor proteins and/or Major Histocompatibility Complex (MHC) receptors. Epitopes are present in nature, and can be isolated, purified or otherwise prepared/derived by humans. For example, epitopes can be prepared by isolation from a natural source, or they can be synthesized in accordance with standard protocols in the art. Synthetic epitopes can comprise artificial amino acids, “amino acid mimetics,” such as D isomers of naturally-occurring L amino acids or non-naturally-occuring amino acids such as cyclohexylalanine. Throughout this disclosure, epitopes may be referred to in some cases as peptides. The variants of the invention are set forth in Tables 6-9 and FIGS. 1A-4.

[0146] It is to be appreciated that proteins or peptides that comprise a variant of the invention as well as additional amino acid(s) are still within the bounds of the invention. In certain embodiments, the peptide comprises a fragment of an antigen. A “fragment of an antigen” or “antigenic fragment” or simply “fragment” is a portion of an antigen which has 100% identity with a wild type antigen or naturally-ocurring variant thereof. The fragment may or may not comprise an epitope of the invention. The fragment may be less than or equal to 600 amino acids, less than or equal to 500 amino acids, less than or equal to 400 amino acids, less than or equal to 250 amino acids, less than or equal to 100 amino acids, less than or equal to 85 amino acids, less than or equal to 75 amino acids, less than or equal to 65 amino acids, or less than or equal to 50 amino acids in length. In certain embodiments, a fragment is e.g., less than 101 or less than 51 amino acids in length, in any increment down to 5 amino acids in length. For example, the fragment may be 5, 6, 7, 8, 9, 10, 11, 12, 13, 14, 15, 16, 17, 18, 19, 20, 21, 22, 23, 24, 25, 26, 27, 28, 29, 30, 31, 32, 33, 34, 35, 36, 37, 38, 39, 40, 41, 42, 43, 44, 45, 46, 47, 48, 49, 50, 51, 52, 53, 54, 55, 56, 57, 58, 59, 60, 61, 62, 63, 64, 65, 66, 67, 68, 69, 70, 71, 72, 73, 74, 75, 76, 77, 78, 79, 80, 81, 82, 83, 84, 85, 86, 87, 88, 89, 90, 91, 92, 93, 94, 95, 96, 97, 98, 99, or 100 amino acids in length.

[0147] In certain embodiments, there is a limitation on the length of a peptide of the invention. The embodiment that is length-limited occurs when the protein/peptide comprising an epitope of the invention comprises a region (i.e., a contiguous series of amino acids) having 100% identity with a native sequence. In order to avoid the definition of epitope from reading, e.g., on whole natural molecules, there is a limitation on the length of any region that has 100% identity with a native peptide sequence. Thus, for a peptide comprising an epitope of the invention and a region with 100% identity with a native peptide sequence, the region with 100% identity to a native sequence generally has a length of: less than or equal to 600 amino acids, often less than or equal to 500 amino acids, often less than or equal to 400 amino acids, often less than or equal to 250 amino acids, often less than or equal to 100 amino acids, often less than or equal to 85 amino acids, often less than or equal to 75 amino acids, often less than or equal to 65 amino acids, and often less than or equal to 50 amino acids. In certain embodiments, an “epitope” of the invention is comprised by a peptide having a region with less than 51 amino acids that has 100% identity to a native peptide sequence, in any increment down to 5 amino acids.

[0148] Accordingly, peptide or protein sequences longer than 600 amino acids are within the scope of the invention, so long as they do not comprise any contiguous sequence of more than 600 amino acids that have 100% identity with a native peptide sequence. For any peptide that has five contiguous residues or less that correspond to a native sequence, there is no limitation on the maximal length of that peptide in order to fall within the scope of the invention. It is presently preferred that a peptide of the invention (e.g., a peptide comprising an epitope of the invention) be less than 600 residues long in any increment down to eight amino acid residues.

[0149] A peptide epitope occurring with “high frequency” is one that occurs in at least 30%, at least 40%, at least 50%, at least 60%, at least 70%, at least 80%, or at least 90% of the infectious agents in a population. A “high frequency” peptide epitope is one of the more common in a population, preferably the first most common, second most common, third most common, or fourth most common in a population of variant peptide epitopes.

[0150] “Human Leukocyte Antigen” or “HLA” is a human class I or class II Major Histocompatibility Complex (MHC) protein (see, e.g., Stites, et al., IMMUNOLOGY, 8^{TH} ED., Lange Publishing, Los Altos, Calif. (1994).

[0151] An “HLA supertype or HLA family”, as used herein, describes sets of HLA molecules grouped on the basis of shared peptide-binding specificities. HLA class I molecules that share somewhat similar binding affinity for peptides bearing certain amino acid motifs are grouped into such HLA supertypes. The terms HLA superfamily, HLA supertype family, HLA family, and HLA xx-like molecules (where “xx” denotes a particular HLA type), are synonyms. See Tables 1-4.

[0152] As used herein, “high affinity” with respect to HLA class I molecules is defined as binding with an IC₅₀, or K_{D} value, of 50 nM or less; “intermediate affinity” is binding with an IC₅₀ or K_{D} value of between about 50 and about 500 nM; “weak affinity” is binding with an IC₅₀ or K_{D} value between about 500 and about 5000 nM. “High affinity” with respect to binding to HLA class II molecules is defined as binding with an IC₅₀ or K_{D} value of 100 nM or less; “intermediate affinity” is binding with an IC₅₀ or K_{D} value of between about 100 and about 1000 nM. See “binding data.”

[0153] An “IC₅₀” is the concentration of peptide in a binding assay at which 50% inhibition of binding of a reference peptide is observed. Given the conditions in which the assays are run (i.e., limiting HLA proteins and labeled peptide concentrations), these values approximate K_{D} values. See “binding data.”

[0154] The terms “identical” or percent “identity,” in the context of two or more peptide sequences or antigen fragments, refer to two or more sequences or subsequences that are the same or have a specified percentage of amino acid residues that are the same, when compared and aligned for maximum correspondence over a comparison window, as measured using a sequence comparison algorithm or by manual alignment and visual inspection.

[0155] An “immunogenic” peptide or an “immunogenic” epitope or “peptide epitope” is a peptide that comprises an allele-specific motif or supermotif such that the peptide will bind an HLA molecule and induce a CTL and/or HTL response. Thus, immunogenic peptides of the invention are capable of binding to an appropriate HLA molecule and thereafter inducing a cytotoxic T lymphocyte (CTL) response, or a helper T lymphocyte (HTL) response, to the peptide.

[0156] An “infectious agent” refers to a disease-causing microorganism, including viruses, bacteria, fungi, and protozoa against which a cellular immune response, preferably a CTL response, plays a role in acquired immunity. Examples of infectious agents include viruses such as human immunodeficiency virus (HIV), hepatitis B virus (HBV), hepatitis C virus (HCV), human papillomma virus (HPV), Influenza virus, Dengue virus, Epstein-Barr virus, bacteria such as Mycobacterium tuberculosis and Chlamydia, fungi such as Candida albicans, Cryptococcus neoformans, Coccidoides spp., Histoplasma spp, and Aspergillus fumigatis, protozoa such as Plasmodium spp., including P. falciparum, Trypanosoma spp., Schistosoma spp., Leishmania spp and the like. Preferred infectious agents include HIV, HBV, HCV, HPV, Epstein-Barr virus, Plasmodium falciparum, Influenza virus and Dengue virus.

[0157] The phrases “isolated” or “biologically pure” refer to material which is substantially or essentially free from components which normally accompany the material as it is found in its native state. Thus, isolated peptides in accordance with the invention preferably do not contain materials normally associated with the peptides in their in situ environment. An “isolated” epitope refers to an epitope that does not include the whole sequence of the antigen or polypeptide from which the epitope was derived. Typically the “isolated” epitope does not have attached thereto additional amino acids that result in a sequence that has 100% identity with a native sequence. The native sequence can be a sequence such as a tumor-associated antigen from which the epitope is derived. Thus, the term “isolated” means that the material is removed from its original environment (e.g., the natural environment if it is naturally occurring). For example, a naturally-occurring polynucleotide or peptide present in a living animal is not isolated, but the same polynucleotide or peptide, separated from some or all of the coexisting materials in the natural system, is isolated. Such a polynucleotide could be part of a vector, and/or such a polynucleotide or peptide could be part of a composition, and still be “isolated” in that such vector or composition is not part of its natural environment. Isolated RNA molecules include in vivo or in vitro RNA transcripts of the DNA molecules of the present invention, and further include such molecules produced synthetically.

[0158] “Major Histocompatibility Complex” or “MHC” is a cluster of genes that plays a role in control of the cellular interactions responsible for physiologic immune responses. In humans, the MHC complex is also known as the human leukocyte antigen (HLA) complex. For a detailed description of the MHC and HLA complexes, see, Paul, FUNDAMENTAL IMMUNOLOGY, 3^{RD} ED., Raven Press, New York (1993).

[0159] The term “motif” refers to a pattern of residues in an amino acid sequence of defined length, preferably a peptide of less than about 15 amino acids in length, or less than about 13 amino acids in length, usually from about 8 to about 13 amino acids (e.g., 8, 9, 10, 11, 12, or 13) for a class I HLA motif and from about 6 to about 25 amino acids (e.g., 6, 7, 8, 9, 10, 11, 12, 13, 14, 15, 16, 17, 18, 19, 20, 21, 22, 23, 24, or 25) for a class II HLA motif, which is recognized by a particular HLA molecule. Motifs are typically different for each HLA protein encoded by a given human HLA allele. These motifs often differ in their pattern of the primary and secondary anchor residues. See Tables 1-3.

[0160] A “native” or a “wild type” sequence refers to a sequence found in nature.

[0161] A “negative binding residue” or “deleterious residue” is an amino acid which, if present at certain positions (typically not primary anchor positions) in a peptide epitope, results in decreased binding affinity of the peptide for the peptide's corresponding HLA molecule.

[0162] The term “peptide” is used interchangeably with “oligopeptide” in the present specification to designate a series of residues, typically L-amino acids, connected one to the other, typically by peptide bonds between the α-amino and carboxyl groups of adjacent amino acids.

[0163] A “PanDR binding” peptide or “PADRE®” peptide (Epimmune, San Diego, Calif.) is a member of a family of molecules that binds more than one HLA class II DR molecule. The pattern that defines the PADRE® family of molecules can be referred to as an HLA Class II supermotif. A PADRE® molecule binds to HLA-DR molecules and stimulates in vitro and in vivo human helper T lymphocyte (HTL) responses. For a further definition of the PADRE® family, see copending application U.S. Ser. No. 09/709,774, filed Nov. 11, 2000; and Ser. No. 09/707,738, filed Nov. 6, 2000; PCT publication Nos WO 95/07707, and WO 97/26784; U.S. Pat. No. 5,736,142 issued Apr. 7, 1998; U.S. Pat. No. 5,679,640, issued Oct. 21, 1997; and U.S. Pat. No. 6,413,935, issued Jul. 2, 2002.

[0164] “Pharmaceutically acceptable” refers to a generally non-toxic, inert, and/or physiologically compatible composition or component of a composition.

[0165] A “pharmaceutical excipient” or “excipient” comprises a material such as an adjuvant, a carrier, pH-adjusting and buffering agents, tonicity adjusting agents, wetting agents, preservatives, and the like. A “pharmaceutical excipient” is an excipient which is pharmaceutically acceptable.

[0166] A “primary anchor residue” is an amino acid at a specific position along a peptide sequence which is understood to provide a contact point between the immunogenic peptide and the HLA molecule. One, two or three, primary anchor residues within a peptide of defined length generally defines a “motif” for an immunogenic peptide. These residues are understood to fit in close contact with peptide binding grooves of an HLA molecule, with their side chains buried in specific pockets of the binding grooves themselves. In one embodiment of an HLA class I motif, the primary anchor residues are located at position 2 (from the amino terminal position) and at the carboxyl terminal position of a peptide epitope in accordance with the invention. The primary anchor positions for each motif and supermotif of HLA Class I are set forth in Tables 1-2. For example, analog peptides can be created by altering the presence or absence of particular residues in these anchor positions. Such analogs are used to modulate the binding affinity of an epitope comprising a particular motif or supermotif. A “preferred primary anchor residue” is an anchor residue of a motif or supermotif that is associated with optimal binding. Preferred primary anchor residues are indicated in bold-face in Tables 1-2. A “tolerated primary anchor residue” is an anchor residue of a motif or supermotif that is associated with binding to a lesser extent than a preferred residue. Tolerated primary anchor residues are indicated in italicized text in Tables 1-2.

[0167] “Promiscuous recognition” by a TCR is where a distinct peptide is recognized by the various T cell clones in the context of various HLA molecules. Promiscuous binding by an HLA molecule is synonymous with cross-reactive binding.

[0168] A “protective immune response” or “therapeutic immune response” refers to a CTL and/or an HTL response to an antigen derived from an antigen of an infectious agent, which in some way prevents or at least partially arrests disease symptoms, side effects or progression. The immune response may also include an antibody response which has been facilitated by the stimulation of helper T cells.

[0169] By “ranking” the variants in a population of peptide epitopes is meant ordering each variant by its frequency of occurrance relative to the other variants.

[0170] The term “residue” refers to an amino acid or amino acid mimetic incorporated into a peptide or protein by an amide bond or amide bond mimetic.

[0171] A “secondary anchor residue” is an amino acid at a position other than a primary anchor position in a peptide which may influence peptide binding. A secondary anchor residue occurs at a significantly higher frequency amongst HLA-bound peptides than would be expected by random distribution of amino acids at a given position. A secondary anchor residue can be identified as a residue which is present at a higher frequency among high or intermediate affinity binding peptides, or a residue otherwise associated with high or intermediate affinity binding. The secondary anchor residues are said to occur at “secondary anchor positions.” For example, analog peptides can be created by altering the presence or absence of particular residues in these secondary anchor positions. Such analogs are used to finely modulate the binding affinity of an epitope comprising a particular motif or supermotif. The terminology “fixed peptide” is generally used to refer to an analog peptide that has changes in primary anchore position; not secondary.

[0172] A “subdominant epitope” is an epitope which evokes little or no response upon immunization with a whole antigen or a fragment of the whole antigen comprising a subdominant epitope and a dominant epitope, which comprise the epitope, but for which a response can be obtained by immunization with an isolated peptide, and this response (unlike the case of cryptic epitopes) is detected when whole antigen or a fragment of the whole antigen comprising a subdominant epitope and a dominant epitope is used to recall the response in vitro or in vivo.

[0173] A “supermotif” is a peptide binding specificity shared by HLA molecules encoded by two or more HLA alleles. Preferably, a supermotif-bearing peptide is recognized with high or intermediate affinity (as defined herein) by two or more HLA antigens.

[0174] “Synthetic peptide” refers to a peptide that is abtained from a non-natural source, e.g. is man-made. Such peptides may be produced using such methods as chemical synthesis or recombinant DNA technology. “Synthetic peptides” include “fusion proteins.”

[0175] As used herein, a “vaccine” is a composition used for vaccination, e.g., for prophylaxis or therapy, that comprises one or more peptides of the invention. There are numerous embodiments of vaccines in accordance with the invention, such as by a cocktail of one or more peptides; one or more peptides of the invention comprised by a polyepitopic peptide; or nucleic acids that encode such peptides or polypeptides, e.g., a minigene that encodes a polyepitopic peptide. The “one or more peptides” can include any whole unit integer from 1-150, e.g., at least 1, 2, 3, 4, 5, 6, 7, 8, 9, 10, 11, 12, 13, 14, 15, 16, 17, 18, 19, 20, 21, 22, 23, 24, 25, 26, 27, 28, 29, 30, 31, 32, 33, 34, 35, 36, 37, 38, 39, 40, 41, 42, 43, 44, 45, 46, 47, 48, 49, 50, 51, 52, 53, 54, 55, 56, 57, 58, 59, 60, 65, 70, 75, 80, 85, 90, 95, 100, 105, 110, 115, 120, 125, 130, 135, 140, 145, or 150 or more peptides of the invention. The peptides or polypeptides can optionally be modified, such as by lipidation, addition of targeting or other sequences. HLA class I-binding peptides of the invention can be linked to HLA class II-binding peptides, e.g., a PADRE® universal HTL-bindind peptide, to facilitate activation of both cytotoxic T lymphocytes and helper T lymphocytes. Vaccines can comprise peptide pulsed antigen presenting cells, e.g., dendritic cells.

[0176] A “variant of a peptide epitope” refers to a peptide that is identified from a different viral strain at the same position in an aligned sequence, and that varies by one or more amino acids from the parent peptide epitope. Examples of peptide epitope variants include those shown in Tables 6-9 and FIGS. 1A-4. A “variant of an antigen” refers to an antigen that comprises at least one variant of a peptide epitope. Examples of antigen variants include those listed by sequence and/or accession number in Tables 10-22. A “variant of an infectious agent” refers to an infectious agent whose genome encodes at least one variant of an antigen. Variants of infectious agents are related viral, bacterial, funagl, or protozoan strains or isolates that vary in sequence but cause the same disease symptoms. Examples of infectious agent variants include HIV Clade A, B, and C subtypes, HBV subtypes adr, ayr, adw, and ayw, HCV types 1, 2, 3, 4, 5, and 6, HPV strains 1-92 (preferably strains 16, 18, 31, 33, 45, 52, 56, and 58) (see Table 10, listing accession numbers for the complete genome sequences of 167 HIV variants; Table 22, showing an alignment of the complete polyprotein sequences of 50 HCV variants) (see also, Human Retroviruses and AIDS 2000: A Compilation and Analysis of Nucleic Acid and Amino Acid Sequences, Kuiken C L, et al., Eds. Theoretical Biology and Biophysics Group, Los Alamos National Laboratory, Los Alamos, N. Mex.).

[0177] The nomenclature used to describe peptides/proteins follows the conventional practice wherein the amino group is presented to the left (the N-terminus) and the carboxyl group to the right (the C-terminus) of each amino acid residue. When amino acid residue positions are referred to in a peptide epitope they are numbered in an amino to carboxyl direction with position one being the position closest to the amino terminal end of the epitope, or the peptide or protein of which it may be a part. In the formulae representing selected specific embodiments of the present invention, the amino- and carboxyl-terminal groups, although not specifically shown, are in the form they would assume at physiologic pH values, unless otherwise specified. In the amino acid structure formulae, each residue is generally represented by standard three letter or single letter designations. The L-form of an amino acid residue is represented by a capital single letter or a capital first letter of a three-letter symbol, and the D-form for those amino acids having D-forms is represented by a lower case single letter or a lower case three letter symbol. However, when three letter symbols or full names are used without capitals, they may refer to L amino acids. Glycine has no asymmetric carbon atom and is simply referred to as “Gly” or “G”. The amino acid sequences of peptides set forth herein are generally designated using the standard single letter symbol. (A, Alanine; C, Cysteine; D, Aspartic Acid; E, Glutamic Acid; F, Phenylalanine; G, Glycine; H, Histidine; I, Isoleucine; K, Lysine; L, Leucine; M, Methionine; N, Asparagine; P, Proline; Q, Glutamine; R, Arginine; S, Serine; T, Threonine; V, Valine; W, Tryptophan; and Y, Tyrosine.) In addition to these symbols, “B”in the single letter abbreviations used herein designates α-amino butyric acid. In some embodiments, α-amino butyric acid may be replaced with cysteine.

[0178] Acronyms used herein are as follows:
[0179] APC: Antigen presenting cell
[0180] CD3: Pan T cell marker
[0181] CD4: Helper T lymphocyte marker
[0182] CD8: Cytotoxic T lymphocyte marker
[0183] CEA: Carcinoembryonic antigen (see, e.g., SEQ ID NO: 363)
[0184] CTL: Cytotoxic T lymphocyte
[0185] DC: Dendritic cells. DC functioned as potent antigen presenting cells by stimulating cytokine release from CTL lines that were specific for a model peptide derived from hepatitis B virus. In vivo experiments using DC pulsed ex vivo with an HBV peptide epitope have stimulated CTL immune responses in vivo following delivery to naïve mice.
[0186] DLT: Dose-limiting toxicity, an adverse event related to therapy.
[0187] DMSO: Dimethylsulfoxide
[0188] ELISA: Enzyme-linked immunosorbant assay
[0189] E:T: Effector:Target ratio
[0190] G-CSF: Granulocyte colony-stimulating factor
[0191] GM-CSF: Granulocyte-macrophage (monocyte)-colony stimulating factor
[0192] HBV: Hepatitis B virus
[0193] HER2/neu: A tumor associated antigen; c-erbB-2 is a synonym (see, e.g., SEQ ID NO: 364)
[0194] HLA: Human leukocyte antigen
[0195] HLA-DR: Human leukocyte antigen class II
[0196] HPLC: High Performance Liquid Chromatography
[0197] HTC: Helper T Cell
[0198] HTL: Helper T Lymphocyte. A synonym for HTC.
[0199] ID: Identity
[0200] IFNγ: Interferon gamma
[0201] IL-4: Interleukin-4
[0202] IV: Intravenous
[0203] LU_{30%}: Cytotoxic activity for 10⁶ effector cells required to achieve 30% lysis of a target cell population, at a 100:1 (E:T) ratio.
[0204] MAb: Monoclonal antibody
[0205] MAGE: Melanoma antigen (see, e.g., SEQ ID NO: 365 and 366 for MAGE2 and MAGE3)
[0206] MLR: Mixed lymphocyte reaction
[0207] MNC: Mononuclear cells
[0208] PB: Peripheral blood
[0209] PBMC: Peripheral blood mononuclear cell
[0210] ProGP™: Progenipoietin™ product (Searle, St. Louis, Mo.), a chimeric flt3/G-CSF receptor agonist.
[0211] SC: Subcutaneous
[0212] S.E.M.: Standard error of the mean
[0213] QD: Once a day dosing
[0214] TAA: Tumor Associated Antigen
[0215] TNF: Tumor necrosis factor
[0216] WBC: White blood cells

[0217] The following describes the peptides, nucleic acid molecules, compositions, and methods of the invention in more detail.

Methods of Identifying Candidate Peptide Epitopes

[0218] The present invention is directed to methods for selecting a variant of a peptide epitope which induces a CTL response against another variant(s) of the peptide epitope, by determining whether the variant comprises only conserved residues, as defined herein, at non-anchor positions in comparison to the other variant(s).

[0219] In some embodiments, antigen sequences from a population of an infectious agent, said antigens comprising variants of a peptide epitope, are optionally aligned (manually or by computer) along their length, preferably their full length. Variant(s) of a peptide epitope (preferably naturally occurring variants), each 8-11 amino acids in length and comprising the same MHC class I supermotif or motif, are identified manually or with the aid of a computer. In some embodiments, a variant is optionally chosen which comprises preferred anchor residues of said motif and/or which occurs with high frequency within the population of variants. In other embodiments, a variant is randomly chosen. The randomly or otherwise chosen variant is compared to from one to all the remaining variant(s) to determine whether it comprises only conserved residues in the non-anchor positions relative to from one to all the remaining variant(s).

[0220] The present invention is also directed to variants identified by the methods above; peptides comprising such variants; nucleic acids encoding such variants and peptides; cells comprising such variants, and/or peptides, and/or nucleic acids; compositions comprising such variants, and/or peptides, and/or nucleic acids, and/or cells; as well as therapeutic and diagnostic methods for using such variants, peptides, nucleic acids, cells, and compositions.

[0221] In some embodiments, the invention is directed to a method for identifying a candidate peptide epitope which induces a HLA class I CTL response against variants of said peptide epitope, comprising
[0222] a) identifying, from a particular antigen of an infectious agent, variants of a peptide epitope 8-11 amino acids in length, each variant comprising primary anchor residues of the same HLA class I binding motif; and
[0223] b) determining whether one of said variants comprises only conserved non-anchor residues in comparison to at least one remaining variant, thereby identifying a candidate peptide epitope.

[0224] In some embodiments, (b) comprises identifying a variant which comprises only conserved non-anchor residues in comparison to at least 25%, at least 50%, at least 75%, at least 80%, at least 85%, at least 90%, at least 95%, at least 97%, or at least 99% of the remaining variants.

[0225] In some embodiments, the invention is directed to a method for identifying a candidate peptide epitope which induces a HLA class I CTL response against variants of said peptide epitope, comprising
[0226] a) identifying, from a particular antigen of an infectious agent, variants of a peptide epitope 8-11 amino acids in length, each variant comprising primary anchor residues of the same HLA class I binding motif;
[0227] b) determining whether each of said variants comprises conserved, semi-conserved or non-conserved non-anchor residues in comparison to each of the remaining variants; and
[0228] c) identifying a variant which comprises only conserved non-anchor residues in comparison to at least one remaining variant.

[0229] In some embodiments, (c) comprises identifying a variant which comprises only conservative non-anchor residues in comparison to at least 25%, at least 50%, at least 75%, at least 80%, at least 85%, at least 90%, at least 95%, at least 97%, or at least 99% of the remaining variants.

[0230] In some embodiments, the invention is directed to a method for identifying a candidate peptide epitope which induces a HLA class I CTL response against variants of said peptide epitope, comprising
[0231] a) identifying, from a particular antigen of an infectious agent, a population of variants of a peptide epitope 8-11 amino acids in length, each peptide epitope comprising primary anchor residues of the same HLA class I binding motif;
[0232] b) choosing a variant selected from the group consisting of:
   [0233] i) a variant which comprises preferred primary anchor residues of said motif; and
   [0234] ii) a variant which occurs with high frequency within the population of variants; and
[0235] c) determining whether the variant of (b) comprises only conserved non-anchor residues in comparison to at least one remaining variant, thereby identifying a candidate peptide epitope.

[0236] In some embodiments, (c) comprises identifying a variant which comprises only conservative non-anchor residues in comparison to at least 25%, at least 50%, at least 75%, at least 80%, at least 85%, at least 90%, at least 95%, at least 97%, or at least 99% of the remaining variants.

[0237] In some embodiments, the invention is directed to method for identifying a candidate peptide epitope which induces a HLA class I CTL response against variants of said peptide epitope, comprising
[0238] a) identifying, from a particular antigen of an infectious agent, a population of variants of a peptide epitope 8-11 amino acids in length, each peptide epitope comprising primary anchor residues of the same HLA class I binding motif;
[0239] b) choosing a variant selected from the group consisting of:
   [0240] i) a variant which comprises preferred primary anchor residues of said motif; and
   [0241] ii) a variant which occurs with high frequency within the population of variants; and
[0242] c) determining whether the variant of (b) comprises conserved, semi-conserved or non-conserved non-anchor residues in comparison to each of the remaining variants; and
[0243] d) identifying a variant which comprises only conserved non-anchor residues in comparison to at least one remaining variant.

[0244] In some embodiments, (d) comprises identifying a variant which comprises only conservative non-anchor residues in comparison to at least 25%, at least 50%, at least 75%, at least 80%, at least 85%, at least 90%, at least 95%, at least 97%, or at least 99% of the remaining variants.

[0245] In some embodiments, (a) comprises aligning the sequences of said antigens.

[0246] In some embodiments, (b) comprises comprises choosing a variant which comprises preferred primary anchor residues of said motif.

[0247] In some embodiments, (b) comprises comprises choosing a variant which occurs with high frequency within said population.

[0248] In some embodiments, (b) comprises ranking said variants by frequency of occurrence within said population.

[0249] In some embodiments, (b) comprises choosing a variant which comprises preferred primary anchor residues of said motif and which occurs with high frequency within said population.

[0250] In some embodiments, (b) comprises ranking said variants by frequency of occurrence within said population.

[0251] In some embodiments, the identified variant comprises the fewest conserved anchor residues in comparison to each of the remaining variants.

[0252] In some embodiments, the remaining variants comprise 1, 2, 3, 4, 5, 6, 7, 8, 9, 10, 11, 12, 13, 14, 15, 16, 17, 18, 19, 20, 21, 22, 23, 24, 25, 26, 27, 27, 28, 30, 35, 40, 45, 50, 55, 60, 65, 70, 75, 80, 85, 90, 95, 100, 110, 120, 130, 140, 150, 160, 170, 180, 190, 200, 220, 240, 260, 280, or 300 variants.

[0253] In some embodiments, the infectious agent is selected from the group consisting of: HIV, HBV, HCV, HPV, Plasmodium falciparum, Influenza virus, and Dengue virus, Epstein-Barr virus, Mycobacterium tuberculosis, Chlamydia, Candida albicans, Cryptococcus neoformans, Coccidoides spp., Histoplasma spp, Aspergillus fumigatis, Plasmodium spp., Trypanosoma spp., Schistosoma spp., and Leishmania spp.

[0254] In some embodiments, the infectious agent is selected from the group consisting of: HIV, HBV, HCV, HPV, Plasmodium falciparum, Influenza virus, and Dengue virus.

[0255] In some embodiments, the infectious agent is HIV and the antigen is selected from the group consisting of: Gag, Env, Pol, Nef, Rev, Tat, Vif, Vpr, and Vpu.

[0256] In some embodiments, the infectious agent is HBV and the antigen is selected from the group consisting of: Pol, Env, Core, and NS1/Env2.

[0257] In some embodiments, the infectious agent is HCV and the antigen is selected from the group consisting of: Core, E1, E2, NS1, NS2, NS3, NS4, and NS5.

[0258] In some embodiments, the infectious agent is HPV and the antigen is selected from the group consisting of: E1, E2, E3, E4, E5, E6, E7, L1, and L2.

[0259] In some embodiments, the infectious agent is Plasmodium falciparum and the antigen is selected from the group consisting of: CSP, SSP2, EXP1, LSA1.

[0260] In some embodiments, the selected variant and the at least one remaining variant comprise different primary anchor residues of the same motif or supermotif.

[0261] In some embodiments, the motif or supermotif is selected from the group consisting of those in Tables 1-2.

[0262] In some embodiments, the conserved non-anchor residues are at any of positions 3-7 of said variant.

[0263] In some embodiments, the variant comprises only 1-3 conserved non-anchor residues compared to at least one remaining variant.

[0264] In some embodiments, the variant comprises only 1-2 conserved non-anchor residues compared to at least one remaining variant.

[0265] In some embodiments, the variant comprises only 1 conserved non-anchor residue compared to at least one remaining variant.

[0266] In some embodiments, the infectious agent is HPV, and further wherein, the HPV infectious agent is selected from the group consisting of HPV strains 16, 18, 31, 33, 45, 52, 56, and 58.

[0267] In some embodiments, the variants are a population of naturally occurring variants.

[0268] Optional Alignment. Optionally, antigen sequences, either full-length or partial, may be aligned mannually or by computer. Convenient computer programs for aligning multiple sequences include Omiga, Oxford software, version 1.1.3, using ClustalW alignment, using an open gap penalty of 10.0, extend gap penalty of 0.05, and delay divergent sequences of 40.0 (See, e.g., Table 21); and BLASTP 2.2.5 (Nov. 16, 2002) (Altschul, S. F., et al., Nucleic Acids Res. 25:3389-3402 (1997)) using a cutoff=3e-88 (to select human sequences) (see, e.g., Table 20). Alternatively, alignments may be obtained through publicly available sources such as published journal articles and published patent documents or as disclosed herein (see, e.g., Tables 10-22).

[0269] HLA Class I Motifs Indicative of CTL Inducing Peptide Epitopes. A large fraction of HLA class I and class II molecules can be classified into a relatively few supertypes, each respective supertype characterized by largely overlapping peptide binding repertoires, and consensus structures of the main peptide binding pockets. Thus, peptides of the present invention are preferably identified by the primary residues of any one of several HLA-specific amino acid motifs, or if the presence of the motif corresponds to the ability to bind several allele-specific HLA antigens, a supermotif (see, e.g., Tables 1-2). The preferred primary residues are indicated in bold, while the tolerated primary residues are indicated by italics.

[0270] The primary anchor residues of the HLA class I peptide epitope supermotifs and motifs are summarized in Tables 1-2. Preferred primary anchors are shown in bold, while tolerated primary anchors are shown in italics. Primary and secondary anchor positions for HLA Class I are summarized in Table 3. Allele-specific HLA molecules that fall within the various HLA class I supertypes are listed in Table 4. In some cases, patterns of amino acid residues are present in both a motif and a supermotif. The relationship of a particular motif and any related supermotif is indicated in the description of the individual motifs.

[0271] Thus, the peptide motifs and supermotifs described below, and summarized in Tables 1-2, provide guidance for the identification and use of peptide epitopes comprising primary anchor residues of motifs or supermotifs in accordance with the invention.

[0272] Allele-specific HLA molecules that comprise HLA class I supertype families are listed in Table 4.

[0273] HLA-A1 supermotif. The HLA-A1 supermotif is characterized by the presence in peptide ligands of a small (T or S) or hydrophobic (L, I, V, or M) primary anchor residue in position 2, and an aromatic (Y, F, or W) primary anchor residue at the C-terminal position of the epitope. The corresponding family of HLA molecules that bind to the A1 supermotif (i.e., the HLA-A1 supertype) is comprised of at least A*0101, A*2601, A*2602, A*2501, and A*3201 (see, e.g., DiBrino, M. et al., J. Immunol. 151:5930, 1993; DiBrino, M. et al., J. Immunol. 152:620, 1994; Kondo, A. et al., Immunogenetics 45:249, 1997). Other allele-specific HLA molecules predicted to be members of the A1 superfamily are shown in Table 4. Peptides binding to each of the individual HLA proteins can be modulated by substitutions at primary and/or secondary anchor positions, preferably choosing respective residues specified for the supermotif.

[0274] HLA-A2 supermotif. Primary anchor specificities for allele-specific HLA-A2.1 molecules (see, e.g., Falk et al., Nature 351:290-296, 1991; Hunt et al., Science 255:1261-1263, 1992; Parker et al., J. Immunol. 149:3580-3587, 1992; Ruppert et al., Cell 74:929-937, 1993) and cross-reactive binding among HLA-A2 and -A28 molecules have been described. (See, e.g., Fruci et al., Human Immunol. 38:187-192, 1993; Tanigaki et al., Human Immunol 39:155-162, 1994; Del Guercio et al., J. Immunol. 154:685-693, 1995; Kast et al., J. Immunol. 152:3904-3912, 1994 for reviews of relevant data.) These primary anchor residues define the HLA-A2 supermotif; which presence in peptide ligands corresponds to the ability to bind several different HLA-A2 and -A28 molecules. The HLA-A2 supermotif comprises peptide ligands with L, I, V, M, A, T, or Q as a primary anchor residue at position 2 and L, I, V, M, A, or T as a primary anchor residue at the C-terminal position of the epitope.

[0275] The corresponding family of HLA molecules (i.e., the HLA-A2 supertype that binds these peptides) is comprised of at least: A*0201, A*0202, A*0203, A*0204, A*0205, A*0206, A*0207, A*0209, A*0214, A*6802, and A*6901. Other allele-specific HLA molecules predicted to be members of the A2 superfamily are shown in Table 4. As explained in detail below, binding to each of the individual allele-specific HLA molecules can be modulated by substitutions at the primary anchor and/or secondary anchor positions, preferably choosing respective residues specified for the supermotif.

[0276] The motifs comprising the primary anchor residues V, A, T, or Q at position 2 and L, I, V, A, or T at the C-terminal position are those most particularly relevant to the invention claimed herein.

[0277] HLA-A3 supermotif. The HLA-A3 supermotif is characterized by the presence in peptide ligands of A, L, I, V, M, S, or, T as a primary anchor at position 2, and a positively charged residue, R or K, at the C-terminal position of the epitope, e.g. in position 9 of 9-mers (see, e.g., Sidney et al., Hum. Immunol. 45:79, 1996). Exemplary members of the corresponding family of HLA molecules (the HLA-A3 supertype) that bind the A3 supermotif include at least A*0301, A*1101, A*3101, A*3301, and A*6801. Other allele-specific HLA molecules predicted to be members of the A3 supertype are shown in Table 4. As explained in detail below, peptide binding to each of the individual allele-specific HLA proteins can be modulated by substitutions of amino acids at the primary and/or secondary anchor positions of the peptide, preferably choosing respective residues specified for the supermotif.

[0278] HLA-A24 supermotif. The HLA-A24 supermotif is characterized by the presence in peptide ligands of an aromatic (F, W, or Y) or hydrophobic aliphatic (L, I, V, M, or T) residue as a primary anchor in position 2, and Y, F, W, L, I, or M as primary anchor at the C-terminal position of the epitope (see, e.g., Sette and Sidney, Immunogenetics, in press, 1999). The corresponding family of HLA molecules that bind to the A24 supermotif (i.e., the A24 supertype) includes at least A*2402, A*3001, and A*2301. Other allele-specific HLA molecules predicted to be members of the A24 supertype are shown in Table 4. Peptide binding to each of the allele-specific HLA molecules can be modulated by substitutions at primary and/or secondary anchor positions, preferably choosing respective residues specified for the supermotif.

[0279] HLA-B7 supermotif. The HLA-B7 supermotif is characterized by peptides bearing proline in position 2 as a primary anchor, and a hydrophobic or aliphatic amino acid (L, I, V, M, A, F, W, or Y) as the primary anchor at the C-terminal position of the epitope. The corresponding family of HLA molecules that bind the B7 supermotif (i.e., the HLA-B7 supertype) is comprised of at least twenty six HLA-B proteins including: B*0702, B*0703, B*0704, B*0705, B*1508, B*3501, B*3502, B*3503, B*3504, B*3505, B*3506, B*3507, B*3508, B*5101, B*5102, B*5103, B*5104, B*5105, B*5301, B*5401, B*5501, B*5502, B*5601, B*5602, B*6701, and B*7801 (see, e.g., Sidney, et al., J. Immunol. 154:247, 1995; Barber, et al., Curr. Biol. 5:179, 1995; Hill, et al., Nature 360:434, 1992; Rammensee, et al., Immunogenetics 41:178, 1995 for reviews of relevant data). Other allele-specific HLA molecules predicted to be members of the B7 supertype are shown in Table 4. As explained in detail below, peptide binding to each of the individual allele-specific HLA proteins can be modulated by substitutions at the primary and/or secondary anchor positions of the peptide, preferably choosing respective residues specified for the supermotif.

[0280] HLA-B27 supermotif. The HLA-B27 supermotif is characterized by the presence in peptide ligands of a positively charged (R, H, or K) residue as a primary anchor at position 2, and a hydrophobic (F, Y, L, W, M, L A, or V) residue as a primary anchor at the C-terminal position of the epitope (see, e.g., Sidney and Sette, Immunogenetics, in press, 1999). Exemplary members of the corresponding family of HLA molecules that bind to the B27 supermotif (i.e., the B27 supertype) include at least B*1401, B*1402, B*1509, B*2702, B*2703, B*2704, B*2705, B*2706, B*3801, B*3901, B*3902, and B*7301. Other allele-specific HLA molecules predicted to be members of the B27 supertype are shown in Table 4. Peptide binding to each of the allele-specific HLA molecules can be modulated by substitutions at primary and/or secondary anchor positions, preferably choosing respective residues specified for the supermotif.

[0281] HLA-B44 supermotif. The HLA-B44 supermotif is characterized by the presence in peptide ligands of negatively charged (D or E) residues as a primary anchor in position 2, and hydrophobic residues (F, W, Y, L, I, M, V, or A) as a primary anchor at the C-terminal position of the epitope (see, e.g., Sidney et al., Immunol. Today 17:261, 1996). Exemplary members of the corresponding family of HLA molecules that bind to the B44 supermotif (i.e., the B44 supertype) include at least: B*1801, B*1802, B*3701, B*4001, B*4002, B*4006, B*4402, B*4403, and B*4006. Peptide binding to each of the allele-specific HLA molecules can be modulated by substitutions at primary and/or secondary anchor positions; preferably choosing respective residues specified for the supermotif.

[0282] HLA-B58 supermotif. The HLA-B58 supermotif is characterized by the presence in peptide ligands of a small aliphatic residue (A, S, or T) as a primary anchor residue at position 2, and an aromatic or hydrophobic residue (F, W, Y, L, I, V, M, or A) as a primary anchor residue at the C-terminal position of the epitope (see, e.g., Sidney and Sette, Immunogenetics, in press, 1999 for reviews of relevant data). Exemplary members of the corresponding family of HLA molecules that bind to the B58 supermotif (i.e., the B58 supertype) include at least: B*1516, B*1517, B*5701, B*5702, and B*5801. Other allele-specific HLA molecules predicted to be members of the B58 supertype are shown in Table 4. Peptide binding to each of the allele-specific HLA molecules can be modulated by substitutions at primary and/or secondary anchor positions, preferably choosing respective residues specified for the supermotif.

[0283] HLA-B62 supermotif. The HLA-B62 supermotif is characterized by the presence in peptide ligands of the polar aliphatic residue Q or a hydrophobic aliphatic residue (L, V, M, I, or P) as a primary anchor in position 2, and a hydrophobic residue (F, W, Y, M, I, V, L, or A) as a primary anchor at the C-terminal position of the epitope (see, e.g., Sidney and Sette, Immunogenetics, in press, 1999). Exemplary members of the corresponding family of HLA molecules that bind to the B62 supermotif (i.e., the B62 supertype) include at least: B*1501, B*1502, B*1513, and B5201. Other allele-specific HLA molecules predicted to be members of the B62 supertype are shown in Table 4. Peptide binding to each of the allele-specific HLA molecules can be modulated by substitutions at primary and/or secondary anchor positions, preferably choosing respective residues specified for the supermotif.

[0284] HLA-A1 motif. The HLA-A1 motif is characterized by the presence in peptide ligands of T, S, or M as a primary anchor residue at position 2 and the presence of Y as a primary anchor residue at the C-terminal position of the epitope. An alternative allele-specific A1 motif is characterized by a primary anchor residue at position 3 rather than position 2. This motif is characterized by the presence of D, E, A, or S as a primary anchor residue in position 3, and a Y as a primary anchor residue at the C-terminal position of the epitope (see, e.g., DiBrino et al., J. Immunol., 152:620, 1994; Kondo et al., Immunogenetics 45:249, 1997; and Kubo et al., J. Immunol. 152:3913, 1994 for reviews of relevant data). Peptide binding to HLA A1 can be modulated by substitutions at primary and/or secondary anchor positions, preferably choosing respective residues specified for the motif.

[0285] Those epitopes comprising T, S, or M at position 2 and Y at the C-terminal position are also HLA-A1 supermotif-bearing peptide epitopes, as these residues are a subset of the A1 supermotif primary anchors.

[0286] HLA-A*0201 motif. An HLA-A2*0201 motif was determined to be characterized by the presence in peptide ligands of L or M as a primary anchor residue in position 2, and L or V as a primary anchor residue at the C-terminal position of a 9-residue peptide (see, e.g., Falk et al., Nature 351:290-296, 1991) and was further found to comprise an I at position 2 and I or A at the C-terminal position of a nine amino acid peptide (see, e.g., Hunt et al., Science 255:1261-1263, Mar. 6, 1992; Parker et al., J. Immunol. 149:3580-3587, 1992). The A*0201 allele-specific motif has also been defined by the present inventors to additionally comprise V, A, T, or Q as a primary anchor residue at position 2, and M or T as a primary anchor residue at the C-terminal position of the epitope (see, e.g., Kast et al., J. Immunol. 152:3904-3912, 1994). Thus, the HLA-A*0201 motif comprises peptide ligands with L, I, V, M, A, T, or Q as primary anchor residues at position 2 and L, I, V, M, A, or T as a primary anchor residue at the C-terminal position of the epitope. The preferred and tolerated residues that characterize the primary anchor positions of the HLA-A*0201 motif are identical to the residues describing the A2 supermotif (For reviews of relevant data, see, e.g., Del Guercio et al., J. Immunol. 154:685-693, 1995; Ruppert et al., Cell 74:929-937, 1993; Sidney et al., Immunol. Today 17:261-266, 1996; Sette and Sidney, Curr. Opin. in Immunol. 10:478-482, 1998). Secondary anchor residues that characterize the A*0201 motif have additionally been defined (see, e.g., Ruppert et al., Cell 74:929-937, 1993). These are shown in Table 3. Peptide binding to HLA-A*0201 molecules can be modulated by substitutions at primary and/or secondary anchor positions, preferably choosing respective residues specified for the motif.

[0287] HLA-A3 motif. The HLA-A3 motif is characterized by the presence in peptide ligands of L, M, V, I, S, A, T, F, C, G, or D as a primary anchor residue at position 2, and the presence of K, Y, R, H, F, or A as a primary anchor residue at the C-terminal position of the epitope (see, e.g., DiBrino et al., Proc. Natl. Acad. Sci USA 90:1508, 1993; and Kubo et al., J. Immunol. 152:3913-3924, 1994). Peptide binding to HLA-A3 can be modulated by substitutions at primary and/or secondary anchor positions, preferably choosing respective residues specified for the motif.

[0288] The A3 supermotif primary anchor residues comprise a subset of the A3- and A11-allele specific motif primary anchor residues.

[0289] HLA-A11 motif. The HLA-A11 motif is characterized by the presence in peptide ligands of V, T, M, L, I, S, A, G, N, C, D, or F as a primary anchor residue in position 2, and K, R, Y, or H as a primary anchor residue at the C-terminal position of the epitope (see, e.g., Zhang et al., Proc. Natl. Acad. Sci USA 90:2217-2221, 1993; and Kubo et al., J. Immunol. 152:3913-3924, 1994). Peptide binding to HLA-A11 can be modulated by substitutions at primary and/or secondary anchor positions, preferably choosing respective residues specified for the motif.

[0290] There is extensive overlap between the A3 and A11 motif primary anchor specificities.

[0291] HLA-A24 motif. The HLA-A24 motif is characterized by the presence in peptide ligands of Y, F, W, or M as a primary anchor residue in position 2, and F, L, I, or W as a primary anchor residue at the C-terminal position of the epitope (see, e.g., Kondo et al., J. Immunol. 155:4307-4312, 1995; and Kubo et al., J. Immunol. 152:3913-3924, 1994). Peptide binding to HLA-A24 molecules can be modulated by substitutions at primary and/or secondary anchor positions; preferably choosing respective residues specified for the motif.

[0292] The primary anchor residues characterizing the A24 allele-specific motif comprise a subset of the A24 supermotif primary anchor residues.

[0293] Computer or Manual Screening. Peptides bearing HLA Class I or Class II supermotifs or motifs may be identified by computer searches or manually, e.g., as follows. In utilizing computer screening to identify peptide epitopes, a protein sequence or translated sequence may be analyzed using software developed to search for motifs, for example the “FINDPATTERNS’ program (Devereux, et al. Nucl. Acids Res. 12:387-395, 1984) or MotifSearch 1.4 software program (D. Brown, San Diego, Calif.) to identify potential peptide sequences containing appropriate HLA binding motifs. The identified peptides can be scored using customized polynomial algorithms to predict their capacity to bind specific HLA class I or class II alleles. As appreciated by one of ordinary skill in the art, a large array of computer programming software and hardware options are available in the relevant art which can be employed to implement the motifs in order to evaluate (e.g., without limitation, to identify epitopes, identify epitope concentration per peptide length, or to generate analogs) known or unknown peptide sequences.

[0294] Translated antigen protein sequences may be analyzed using a text string search software program, e.g., MotifSearch 1.4 (D. Brown, San Diego) to identify potential peptide sequences containing appropriate HLA binding motifs; alternative programs are readily produced in accordance with information in the art in view of the motif/supermotif disclosure herein. Furthermore, such calculations can be made mentally.

[0295] Identified supermotif or motif sequences may be scored using polynomial algorithms to predict their capacity to bind to specific HLA-Class I or Class II molecules. These polynomial algorithms take into account both extended and refined motifs (that is, to account for the impact of different amino acids at different positions), and are essentially based on the premise that the overall affinity (or ΔG) of peptide-HLA molecule interactions can be approximated as a linear polynomial function of the type:
“ΔG”=a₁ᵢ×a₂ᵢ×a₃ᵢ . . . ×aₙᵢ
where aⱼᵢ is a coefficient which represents the effect of the presence of a given amino acid (j) at a given position (i) along the sequence of a peptide of n amino acids. The crucial assumption of this method is that the effects at each position are essentially independent of each other (i.e., independent binding of individual side-chains). When residue j occurs at position i in the peptide, it is assumed to contribute a constant amount jᵢ to the free energy of binding of the peptide irrespective of the sequence of the rest of the peptide. This assumption is justified by studies from our laboratories that demonstrated that peptides are bound to MHC and recognized by T cells in essentially an extended conformation (data omitted herein).

[0296] The method of derivation of specific algorithm coefficients has been described in Gulukota et al., J. Mol. Biol. 267:1258-126, 1997; (see also Sidney et al., Human Immunol. 45:79-93, 1996; and Southwood et al., J. Immunol. 160:3363-3373, 1998). Briefly, for all i positions, anchor and non-anchor alike, the geometric mean of the average relative binding (ARB) of all peptides carrying j is calculated relative to the remainder of the group, and used as the estimate of jᵢ. For Class II peptides, if multiple alignments are possible, only the highest scoring alignment is utilized, following an iterative procedure. To calculate an algorithm score of a given peptide in a test set, the ARB values corresponding to the sequence of the peptide are multiplied. If this product exceeds a chosen threshold, the peptide is predicted to bind. Appropriate thresholds are chosen as a function of the degree of stringency of prediction desired.

[0297] Additional methods to identify preferred peptide sequences, which also make use of specific motifs, include the use of neural networks and molecular modeling programs (see, e.g., Milik et al., Nature Biotechnology 16:753, 1998; Altuvia et al., Hum. Immunol. 58:1, 1997; Altuvia et al, J. Mol. Biol. 249:244, 1995; Buus, S. Curr. Opin. Immunol. 11:209-213, 1999; Brusic, V. et al., Bioinformatics 14:121-130, 1998; Parker et al., J. Immunol. 152:163, 1993; Meister et al., Vaccine 13:581, 1995; Hammer et al., J. Exp. Med. 180:2353, 1994; Sturniolo et al., Nature Biotechnol. 17:555 1999).

[0298] Conserved, Semi-conserved, and Non-conserved Non-anchor Residues. The determination of non-anchor residues as being conserved (conservative) or semi-conserved (semi-conservative) or non-conserved (non-conservative) in comparison to the non-anchor poitions of from one to all of the remaining variant(s) is defined by as follows, the results of which are summarized in Table 5.

[0299] Table 5 shows the similarity assignments between any given amino acid pair so that a given amino acid substitution could be characterized as being a (conservative) or semi-conserved (semi-conservative) or non-conserved (non-conservative) residue.

[0300] The degree of similarity between amino acid pairs was quantified by averaging, for each amino acid pair, the rank coefficient scores for PAM250, hydrophobicity, and side chain volume as described below. Based on the average values of these composite rankings, Table 5 shows each pair to be conserved, semi-conserved or non-conserved.

[0301] The Dayhoff PAM250 score (Dayhoff, M. O., et al., Atlas of Protein Sequence and Structure, Vol. 5, suppl.3. (1978) M. O. Dayhoff, ed. National Biomedical Research Foundation, Washington D.C., p. 345; Creighton, T. E., Proteins: structures and molecular properties (1993) (2nd edition) W.H. Freeman and Company, NY; http://prowl.rockefeller.edu/aainfo/pam250.html) is a commonly utilized protein alignment scoring matrix which measures the percentage of acceptable point mutations (PAM) within a defined time frame. The frequencies of these mutations are different from what would be expected from the probability of random mutations, and presumably reflect a bias due to the degree of physical and chemical similarity of the amino acid pair involved in the substitution. To obtain a score of amino acid similarity that could be standardized with other measures of similarity, the PAM250 scores were converted to a rank value, where 1 indicates the highest probability of being an accepted mutation.

[0302] The most commonly utilized scales to represent the relative hydrophobicity of the 20 naturally occurring amino acids (Cornette, J., et al., J. Mol. Biol. (1987) 195:659) are those developed on the basis of experimental data by Kyte and Doolittle (Kyte, J. and R. F. Doolittle, J. Mol. Biol. (1982) 157:105), and by Fauchere and Pliska (Fauchere, J. and V. Pliska, Eur. J. Med. Chem. (1983) 18:369). The Kyte/Doolittle scale measures the H₂O/organic solvent partition of individual amino acids. Because it considers the position of amino acids in folded proteins, it may most accurately reflect native hydrophobicity in the context of proteins. The Fauchere/Pliska scale measures the octanol/H₂O partitioning of N-acetyl amino acid amides, and most accurately reflects hydrophobicity in the context of denatured proteins and/or small synthetic peptides. To obtain scores for hydrophobicity, each amino acid residue was ranked on both the Kyte/Doolittle and Fauchere/Pliska hydrophobicity scales. An average rank between the two scales was calculated and the average difference in hydrophobicity for each pair was calculated.

[0303] Finally, for calculating amino acid side-chain volume, the partial volume in solution obtained by noting the increase in volume of water after adding either one molecule or one gram of amino acid residue was considered (Zamyatnin, A. A., Ann. Rev. Biophys. Bioeng. (1984) 13:145; Zamyatnin, A. A., Prog. Biophys. Mol. Biol. (1972) 24:107). The absolute difference in the partial volume of each possible pairing of the 20 naturally occurring amino acids was calculated and ranked, where 1 indicated residues with the most similar volumes, and 20 the most dissimilar.

[0304] Thus, by consulting Table 5, one can determine whether a residue in a variant is considered to be conserved, semi-conserved, or non-conserved in comparison to a residue in another variant(s). The residue of the parent variant (randomly or otherwise chosen variant) is shown across the top of Table 5, and the residue of the variant(s) it is compared with is shown below the parent residue.

[0305] As shown in Table 5, each of the amino acids shown across the top of the table bears a numerically defined relationship to the remaining 19 genetically encoded amino acids. The lower the index, the higher the conservation; the same amino acid will have a similarity assignment of 1.0; maximally different amino acids will have similarity assignments approaching 20. Using the method set forth above, amino acids which are not gene-encoded can also be assigned similarity indices and can be classified with respect to any natively occurring amino acid as conserved (conservative) or semi-conserved (semi-conservative) or non-conserved (non-conservative).

Variant Peptide Epitopes

[0306] In some embodiments, the invention is directed to an isolated peptide comprising or consisting of a variant. In some embodiments, the invention is directed to an isolated polynucleotide encoding such a peptide.

[0307] The isolated variants of the invention are all class I binding peptides, i.e., CTL peptides. In particular, the variants of the invention comprise a motif or supermotif, as described above. Variants of the invention are those set forth in Tables 6-9 and FIGS. 1A-4 (SEQ ID Nos:______). Variants of the invention may be referred to herein as “variants” and “variant peptide epitopes” or referred to by Table or referred to by SEQ ID NO. Other peptide epitopes are referred to herein as CTL epitopes or CTL peptides and HTL epitopes or HTL peptides.

[0308] Peptides and Polynucleotides. In some embodiments, the invention is directed to an isolated peptide comprising or consisting of a variant, wherein the variant consists of a sequence selected from those in Tables 6-9 and FIGS. 1A-4 (SEQ ID Nos:______).

[0309] Peptides of the invention may be fusion proteins of variant(s) to CTL epitope(s), and/or HTL epitope(s), and/or linker(s), and/or spacer(s), and/or carrier(s), and/or additional amino acid(s), and/or may comprise or consist of homopolymers of a variant or heteropolymers of more than one variant, as is described in detail below.

[0310] Peptides which comprise a variant of the invention may comprise or consist of a fragment of an antigen (“fragment” or “antigenic fragment”), wherein the fragment comprises a variant. The fragment may be a portion of any antigen of an infectious agent, e.g., the sequences in Tables 11-22 (SEQ ID Nos:______, respectively). The variant of the invention may be within the fragment or may be linked, directly or indirectly, to the fragment.

[0311] The fragment may comprise or consist of a region of a native antigen that contains a high concentration of class I and/or class II epitopes, preferably it contains the greatest number of epitopes per amino acid length. Such epitopes can be present in a frame-shifted manner, e.g. a 10 amino acid long peptide could contain two 9 amino acid long epitopes and one 10 amino acid long epitope.

[0312] The fragment may be less than or equal to 600 amino acids, less than or equal to 500 amino acids, less than or equal to 400 amino acids, less than or equal to 250 amino acids, less than or equal to 100 amino acids, less than or equal to 85 amino acids, less than or equal to 75 amino acids, less than or equal to 65 amino acids, or less than or equal to 50 amino acids in length. In certain embodiments, a fragment is less than 101 amino acids in length, in any increment down to 5 amino acids in length. For example, the fragment may be 5, 6, 7, 8, 9, 10, 11, 12, 13, 14, 15, 16, 17, 18, 19, 20, 21, 22, 23, 24, 25, 26, 27, 28, 29, 30, 31, 32, 33, 34, 35, 36, 37, 38, 39, 40, 41, 42, 43, 44, 45, 46, 47, 48, 49, 50, 51, 52, 53, 54, 55, 56, 57, 58, 59, 60, 61, 62, 63, 64, 65, 66, 67, 68, 69, 70, 71, 72, 73, 74, 75, 76, 77, 78, 79, 80, 81, 82, 83, 84, 85, 86, 87, 88, 89, 90, 91, 92, 93, 94, 95, 96, 97, 98, 99, or 100 amino acids in length. Fragments of full length antigens may be fragments from about residue 1-20, 21-40, 41-60, 61-80, 81-100, 101-120, 121-140, 141-160, 161-180, 181-200, 201-220, 221-240, 241-260, 261-280, 281-300, 301-320, 321-340, 341-360, 361-380, 381-400, 401-420, 421-440, 441-460, 461-480, 481-500, 501-520, 521-540, 541-560, 561-580, 581-600, 601-620, 621-680, 681-700, 701-720, 721-740, 741-780, 781-800, 801-820, 821-840, 841-860, 861-880, 881-900, 901-920, 921-940, 941-960, 961-980, 981 to the C-terminus of the antigen.

[0313] Peptides which comprise a variant of the invention may be a fusion protein comprising one or more amino acid residues in addition to the variant or fragment. Fusion proteins include homopolymers and heteropolymers, as described below.

[0314] In some embodiments, the peptide comprises or consists of multiple variants, e.g., 2, 3, 4, 5, 6, 7, 8, or 9 variants of the invention. In some embodiments, the peptide comprises at least 1, at least 2, at least 3, at least 4, at least 5, at least 6, at least 7, or at least 8 variants of the invention.

[0315] The peptide may also be a homopolymer of one variant or the peptide may be a heteropolymer which contains at least two different variants. Polymers have the advantage of increased probability for immunological reaction and, where different variants are used to make up the polymer, the ability to induce antibodies and/or T cells that react with different antigenic determinants of the antigen(s) targeted for an immune response.

[0316] A homopolymer may comprise 2, 3, 4, 5, 6, 7, 8, 9, 10, 11, 12, 13, 14, 15, 16, 17, 18, 19, 20, 21, 22, 23, 24, 25, 26, 27, 28, 29, 30, 31, 32, 33, 34, 35, 36, 37, 38, 39, 40, 45, 50, 55, 60, 65, 70, 75, 80, 85, 90, 95, 100, 105, 110, 115, 120, 125, 130, 135, 140, 145, or 150 copies of the same variant.

[0317] A heteropolymer may comprise one or more copies of an individual variant and one or more copies of one or more different variants of the invention. The variants that form a heteropolymer may all be from the same antigen, e.g., may be from any of those in Tables 11-22 (SEQ ID NOS:______) or other antigens herein or known in the art, or may be from different antigens, preferably from infectious agents. Combinations of variants that may form a heteropolymer include, for example, Gag 545 variants EPLTSLKSLF (SEQ ID NO:______) and YPLASLKSLF (SEQ ID NO:______), or combinations of peptides from different tables in Tables 6-9 and/or FIGS. 1A-4 or those combinations in Tables 23-28. Heteropolymers may contain multiple copies of one or more variants.

[0318] Thus, peptides of the invention such as heteropolymers may comprise a first variant and at least 1, 2, 3, 4, 5, 6, 7, 8, 9, 10, 11, 12, 13, 14, 15, 16, 17, 18, 19, 20, 21, 22, 23, 24, 25, 26, 27, 28, 29, 30, 31, 32, 33, 34, 35, 36, 37, 38, 39, 40, 41, 42, 43, 44, 45, 46, 47, 48, 49, or 50 other (different) variants.

[0319] In some embodiments, the peptide comprising a variant may also comprise a number of CTL and/or HTL epitopes, e.g., 1,2,3,4,5,6,7,8,9, 10, 11, 12, 13, 14, 15, 16, 17, 18, 19, 20, 21, 22, 23, 24, 25, 26, 27, 28, 29, 30, 31, 32, 33, 34, 35, 36, 37, 38, 39, 40, 41, 42, 43, 44, 45, 46, 47, 48, 49, or 50 CTL and/or HTL epitopes.

[0320] The CTL and/or HTL epitope and the variant of the invention may be from the same antigen of an infectious agent or from different antigens. Thus, for example, if the variant is from HIV pol, the CTL peptide and/or HTL peptide may also be from HIV pol. Alternatively, if the variant is from HIV pol, the CTL peptide and/or HTL peptide may be from another antigen such as HIV env or HIV vpr. As another example, if the variant is from HBV E6, the CTL peptide and/or HTL peptide may be from HBV E7. The CTL and/or HTL epitope and the variant of the invention may be from the same infectious agent or different infectious agents. Thus, for example, the variant may be from HIV, and the CTL and/or HTL epitope may be from HIV or may be from another infectious agent sush such as HBV, HCV, HPV, or Plasmodium falciparum.

[0321] The CTL peptide and/or HTL peptide may be from other antigens including hepatitis B core and surface antigens (HBVc, HBVs), hepatitis C antigens, Epstein-Barr virus antigens, human immunodeficiency virus (HIV) antigens and human papilloma virus (HPV) antigens (in particular anitgens from HPV-16, HPV-18, HPV-31, HPV-33, HPV-45, HPV-52, HPV-56 and HPV-58, Mycobacterium tuberculosis and Chlamydia. Examples of suitable fungal antigens include those derived from Candida albicans, Cryptococcus neoformans, Coccidoides spp., Histoplasma spp, and Aspergillus fumigatis. Examples of suitable protozoan parasitic antigens include those derived from Plasmodium spp., including P. falciparum, Trypanosoma spp., Schistosoma spp., Leishmania spp and the like.

[0322] Alternatively, the CTL peptide and/or HTL peptide may be from tumor-associated antigens such as but not limited to, melanoma antigens MAGE-1, MAGE-2, MAGE-3, MAGE-11, MAGE-A10, as well as BAGE, GAGE, RAGE, MAGE-C1, LAGE-1, CAG-3, DAM, MUC1, MUC2, MUC18, NY-ESO-1, MUM-1, CDK4, BRCA2, NY-LU-1, NY-LU-7, NY-LU-12, CASP8, RAS, KIAA-2-5, SCCs, p53, p73, CEA, HER2/neu, Melan-A, gp100, tyrosinase, TRP2, gp75/TRP1, kallikrein, prostate-specific membrane antigen (PSM), prostatic acid phosphatase (PAP), prostate-specific antigen (PSA), PT1-1, ∃-catenin, PRAME, Telomerase, FAK, cyclin D1 protein, NOEY2, EGF-R, SART-1, CAPB, HPVE7, p15, Folate receptor CDC27, PAGE-1, and PAGE-4.

[0323] Examples of CTL peptides and HTL peptides are disclosed in WO 01/42270, published 14 Jun. 2001; WO 01/41788, published 14 Jun. 2001; WO 01/42270, published 14 Jun. 2001; WO 01/45728, published 28 Jun. 2001; and WO 01/41787, published 14 Jun. 2001.

[0324] The HTL peptide may comprise a “loosely HLA-restricted” or “promiscuous” sequence. Examples of amino acid sequences that are promiscuous include sequences from antigens such as tetanus toxoid at positions 830-843 (QYIKANSKFIGITE; SEQ ID NO: 627), Plasmodium falciparum CS protein at positions 378-398 (DIEKKIAKMEKASSVFNVVNS; SEQ ID NO: 628), and Streptococcus 18 kD protein at positions 116-131 (GAVDSILGGVATYGAA; SEQ ID NO: 629). Other examples include peptides bearing a DR 1-4-7 supermotif, or either of the DR3 motifs.

[0325] The HTL peptide may comprise a synthetic peptide such as a Pan-DR-binding epitope (e.g., a PADRE® peptide, Epimmune Inc., San Diego, Calif., described, for example, in U.S. Pat. No. 5,736,142), for example, having the formula aKXVAAZTLKAAa, where “X” is either cyclohexylalanine, phenylalanine, or tyrosine; “Z” is either tryptophan, tyrosine, histidine or asparagine; and “a” is either D-alanine or L-alanine (SEQ ID NO: 746). Certain pan-DR binding epitopes comprise all “L” natural amino acids; these molecules can be provided as peptides or in the form of nucleic acids that encode the peptide. See also, U.S. Pat. Nos. 5,679,640 and 6,413,935.

[0326] The peptide comprising a variant may comprise additional amino acid(s). Such additional amino acids may be Ala, Arg, Asn, Asp, Cys, Gln, Gly, Glu, His, Ile, Leu, Lys, Met, Phe, Pro, Ser, Thr, Tyr, Trp, Val, amino acid mimetics, and other unnatural amino acids such as those described below. Additional amino acids may provide for ease of linking peptides one to another, for linking variants to one another, for linking variants to CTL and/or HTL epitopes, for coupling to a carrier support or larger peptide, for modifying the physical or chemical properties of the peptide or oligopeptide, or the like. Amino acids such as Ala, Arg, Asn, Asp, Cys, Gln, Gly, Glu, His, Ile, Leu, Lys, Met, Phe, Pro, Ser, Thr, Tyr, Trp, or Val, or the like, can be introduced at the C- and/or N-terminus of the peptide and/or can be introduced internally.

[0327] The peptide comprising a variant may comprise an amino acid spacer(s), which may be joined to the variants, CTL epitopes, HTL epitopes, carriers, etc. within a peptide or may be joined to the peptide at the N-and/or C-terminus. Thus, spacers may be at the N-terminus or C-terminus of peptide, or may be internal such that they link or join variants, CTL epitopes, HTL epitopes, carriers, additional amino acids, and/or antigenic fragments one to the other.

[0328] The spacer is typically comprised of one or more relatively small, neutral molecules, such as amino acids or amino acid mimetics, which are substantially uncharged under physiological conditions. The spacers are typically selected from, e.g., Ala, Gly, or other neutral spacers of nonpolar amino acids or neutral polar amino acids. It will be understood that the optionally present spacer may be composed of the same residues or may be composed of one or more different residues and thus may be a homo- or hetero-oligomer of spacer residues. Thus, the spacer may contain more than one Ala residue (poly-alanine) or more than one Gly residue (poly-glycine), or may contain both Ala and Gly residues, e.g., Gly, Gly-Gly-, Ser,Ser-Ser-, Gly-Ser-, Ser-Gly-, etc. When present, the spacer will usually be at least one or two residues, more usually three to six residues and sometimes 10 or more residues, e.g., 3, 4, 5, 6, 7, 8, 9, or 10, or even more residues. (Livingston, B. D. et al. Vaccine 19:4652-4660 (2000)).

[0329] Peptides comprising a variant may comprise carrier(s) such as those well known in the art, e.g., thyroglobulin, albumins such as human serum albumin, tetanus toxoid, polyamino acids such as poly L-lysine, poly L-glutamic acid, influenza virus proteins, hepatitis B virus core protein, and the like. (See Table 29).

[0330] In addition, the peptide comprising or consisting of a variant may be modified by terminal-NH₂ acylation, e.g., by alkanoyl (C₁-C₂₀) or thioglycolyl acetylation, terminal-carboxyl amidation, e.g., ammonia, methylamine, etc. In some instances these modifications may provide sites for linking to a support or other molecule.

[0331] The peptides in accordance with the invention can contain modifications such as but not limited to glycosylation, side chain oxidation, biotinylation, phosphorylation, addition of a surface active material, e.g. a lipid, or can be chemically modified, e.g., acetylation, etc. Moreover, bonds in the peptide can be other than peptide bonds, e.g., covalent bonds, ester or ether bonds, disulfide bonds, hydrogen bonds, ionic bonds, etc.

[0332] Peptides of the present invention may contain substitutions to modify a physical property (e.g., stability or solubility) of the resulting peptide. For example, peptides may be modified by the substitution of a cysteine (C) with α-amino butyric acid (“B”). Due to its chemical nature, cysteine has the propensity to form disulfide bridges and sufficiently alter the peptide structurally so as to reduce binding capacity. Substituting α-amino butyric acid for C not only alleviates this problem, but actually improves binding and crossbinding capability in certain instances. Substitution of cysteine with α-amino butyric acid may occur at any residue of a peptide, e.g., at either anchor or non-anchor positions of a variant within a peptide, or at other positions of a peptide.

[0333] The peptides comprising a variant can comprise amino acid mimetics or unnatural amino acids, e.g. D- or L-naphylalanine; D- or L-phenylglycine; D- or L-2-thieneylalanine; D- or L-1, -2, 3, or 4-pyreneylalanine; D- or L-3 thieneylalanine; D- or L-(2-pyridinyl)-alanine; D- or L-(3-pyridinyl)-alanine; D- or L-(2-pyrazinyl)-alanine; D- or L-(4-isopropyl)-phenylglycine; D-(trifluoromethyl)-phenylglycine; D-(trifluoromethyl)-phenylalanine; D-ρ-fluorophenylalanine; D- or L-ρ-biphenylphenylalanine; D- or L-ρ-methoxybiphenylphenylalanine; D- or L-2-indole(alkyl)alanines; and, D- or L-alkylalanines, where the alkyl group can be a substituted or unsubstituted methyl, ethyl, propyl, hexyl, butyl, pentyl, isopropyl, iso-butyl, sec-isotyl, iso-pentyl, or a non-acidic amino acids. Aromatic rings of a non-natural amino acid include, e.g. thiazolyl, thiophenyl, pyrazolyl, benzimidazolyl, naphthyl, furanyl, pyrrolyl, and pyridyl aromatic rings. Modified peptides that have various amino acid mimetics or unnatural amino acids are particularly useful, as they tend to manifest increased stability in vivo. Such peptides may also possess improved shelf-life or manufacturing properties.

[0334] Peptide stability can be assayed in a number of ways. For instance, peptidases and various biological media, such as human plasma and serum, have been used to test stability. See, e.g., Verhoef, et al., Eur. J. Drug Metab. Pharmacokinetics 11:291 (1986). Half-life of the peptides of the present invention is conveniently determined using a 25% human serum (v/v) assay. The protocol is generally as follows: Pooled human serum (Type AB, non-heat inactivated) is delipidated by centrifugation before use. The serum is then diluted to 25% with RPMI-1640 or another suitable tissue culture medium. At predetermined time intervals, a small amount of reaction solution is removed and added to either 6% aqueous trichloroacetic acid (TCA) or ethanol. The cloudy reaction sample is cooled (4° C.) for 15 minutes and then spun to pellet the precipitated serum proteins. The presence of the peptides is then determined by reversed-phase HPLC using stability-specific chromatography conditions.

[0335] As indicated above, the peptides in accordance with the invention can be a variety of lengths, and either in their neutral (uncharged) forms or in forms which are salts. The peptides in accordance with the invention can contain modifications such as glycosylation, side chain oxidation, or phosphorylation, generally subject to the condition that modifications do not destroy the biological activity of the peptides.

[0336] The peptides of the invention may be lyophylized, or may be in crystal form.

[0337] It is generally preferable that the variant peptide epitope be as small as possible while still maintaining substantially all of the immunologic activity of the native protein. When possible, it may be desirable to optimize HLA class I binding epitopes of the invention to a length of about 8 to about 13 amino acid residues, for example, 8, 9, 10, 11, 12 or 13, preferably 8 to 11 or 9 to 10. It is to be appreciated that one or more epitopes in this size range can be comprised by a longer peptide (see the Definition Section for the term “epitope” for further discussion of peptide length). HLA class II binding epitopes are preferably optimized to a length of about 6 to about 30 amino acids in length, e.g., 6, 7, 8, 9, 10, 11, 12, 13, 14, 15, 16, 17, 18, 19, 20, 21, 22, 23, 24, 25, 26, 27, 28, 29 or 30, preferably to between about 13 and about 20 residues, e.g., 13, 14, 15, 16, 17, 18, 19 or 20. Preferably, the epitopes are commensurate in size with endogenously processed pathogen-derived peptides or tumor cell peptides that are bound to the relevant HLA molecules. The identification and preparation of peptides of various lengths can be carried out using the techniques described herein.

[0338] Peptides in accordance with the invention can be prepared synthetically, by recombinant DNA technology or chemical synthesis, or can be isolated from natural sources such as native tumors or pathogenic organisms. Epitopes may be synthesized individually or joined directly or indirectly in a peptide. Although the peptide will preferably be substantially free of other naturally occurring host cell proteins and fragments thereof, in some embodiments the peptides may be synthetically conjugated to be joined to native fragments or particles.

[0339] The peptides of the invention can be prepared in a wide variety of ways. For relatively short sizes, the peptides can be synthesized in solution or on a solid support in accordance with conventional techniques. Various automatic, synthesizers are commercially available and can be used in accordance with known protocols. (See, for example, Stewart & Young, SOLID PHASE PEPTIDE SYNTHESIS, 2D. ED., Pierce Chemical Co., 1984). Further, individual peptides can be joined using chemical ligation to produce larger peptides that are still within the bounds of the invention.

[0340] Alternatively, recombinant DNA technology can be employed wherein a nucleotide sequence which encodes a peptide inserted into an expression vector, transformed or transfected into an appropriate host cell and cultivated under conditions suitable for expression. These procedures are generally known in the art, as described generally in Sambrook et al., MOLECULAR CLONING, A LABORATORY MANUAL, Cold Spring Harbor Press, Cold Spring Harbor, N.Y. (1989). Thus, recombinant peptides, which comprise or consist of one or more epitopes of the invention, can be used to present the appropriate T cell epitope.

[0341] Polynucleotides encoding each of the peptides above are also part of the invention. As appreciated by one of ordinary skill in the art, various nucleic acids will encode the same peptide due to the redundancy of the genetic code. Each of these nucleic acids falls within the scope of the present invention. This embodiment of the invention comprises DNA and RNA, and in certain embodiments a combination of DNA and RNA. It is to be appreciated that any polynucleotide that encodes a peptide in accordance with the invention falls within the scope of this invention.

[0342] The polynucleotides encoding peptides contemplated herein can be synthesized by chemical techniques, for example, the phosphotriester method of Matteucci, et al., J. Am. Chem. Soc. 103:3185 (1981). Polynucleotides encoding peptides comprising or consisting of a variant can be made simply by substituting the appropriate and desired nucleic acid base(s) for those that encode a related (e.g., analogous) epitope.

[0343] The polynucleotide, e.g. minigene (see below), may be produced by assembling oligonucleotides that encode the plus and minus strands of the polynucleotide, e.g. minigene. Overlapping oligonucleotides (15-100 bases long) may be synthesized, phosphorylated, purified and annealed under appropriate conditions using well known techniques. The ends of the oligonucleotides can be joined, for example, using T4 DNA ligase. A polynucleotide, e.g. minigene, encoding the peptide of the invention, can be cloned into a desired vector such as an expression vector. The coding sequence can then be provided with appropriate linkers and ligated into expression vectors commonly available in the art, and the vectors used to transform suitable hosts to produce the desired peptide such as a fusion protein.

[0344] A large number of such vectors and suitable host systems are known to those of skill in the art, and are commercially available. The following vectors are provided by way of example. Bacterial: pQE70, pQE60, pQE-9 (Qiagen), pBS, pD10, phagescript, psiX174, pBluescript SK, pbsks, pNH8A, pNH16a, pNH18A, pNH46A (Stratagene); ptrc99a, pKK223-3, pKK233-3, pDR540, pRIT5 (Pharmacia); pCR (Invitrogen). Eukaryotic: pWLNEO, pSV2CAT, pOG44, PXT1, pSG (Stratagene) pSVK3, pBPV, pMSG, pSVL (Pharmacia); p75.6 (valentis); pCEP (Invitrogen); pCEI (Epimmune). However, any other plasmid or vector can be used as long as it is replicable and viable in the host.

[0345] As representative examples of appropriate hosts, there can be mentioned: bacterial cells, such as E. coli, Bacillus subtilis, Salmonella typhimurium and various species within the genera Pseudomonas, Streptomyces, and Staphylococcus; fungal cells, such as yeast; insect cells such as Drosophila and Sf9; animal cells such as COS-7 lines of monkey kidney fibroblasts, described by Gluzman, Cell 23:175 (1981), and other cell lines capable of expressing a compatible vector, for example, the C127, 3T3, CHO, HeLa and BHK cell lines or Bowes melanoma; plant cells, etc. The selection of an appropriate host is deemed to be within the scope of those skilled in the art from the teachings herein.

[0346] Thus, the present invention is also directed to vectors, preferably expression vectors useful for the production of the peptides of the present invention, and to host cells comprising such vectors.

[0347] Host cells are genetically engineered (transduced or transformed or transfected) with the vectors of this invention which can be, for example, a cloning vector or an expression vector. The vector can be, for example, in the form of a plasmid, a viral particle, a phage, etc. The engineered host cells can be cultured in conventional nutrient media modified as appropriate for activating promoters, selecting transformants or amplifying the polynucletides. The culture conditions, such as temperature, pH and the like, are those previously used with the host cell selected for expression, and will be apparent to the ordinarily skilled artisan.

[0348] For expression of the peptides, the coding sequence will be provided with operably linked start and stop codons, promoter and terminator regions and usually a replication system to provide an expression vector for expression in the desired cellular host. For example, promoter sequences compatible with bacterial hosts are provided in plasmids containing convenient restriction sites for insertion of the desired coding sequence. The resulting expression vectors are transformed into suitable bacterial hosts.

[0349] Generally, recombinant expression vectors will include origins of replication and selectable markers permitting transformation of the host cell, e.g., the ampicillin resistance gene of E. coli and S. cerevisiae TRP1 gene, and a promoter derived from a highly-expressed gene to direct transcription of a downstream structural sequence. Such promoters can be derived from operons encoding glycolytic enzymes such as 3-phosphoglycerate kinase (PGK), ∀-factor, acid phosphatase, or heat shock proteins, among others. The heterologous structural sequence is assembled in appropriate phase with translation initiation and termination sequences, and preferably, a leader sequence capable of directing secretion of translated protein into the periplasmic space or extracellular medium. Optionally, the heterologous sequence can encode a fusion protein including an N-terminal identification peptide imparting desired characteristics, e.g., stabilization or simplified purification of expressed recombinant product.

[0350] Yeast, insect or mammalian cell hosts may also be used, employing suitable vectors and control sequences. Examples of mammalian expression systems include the COS-7 lines of monkey kidney fibroblasts, described by Gluzman, Cell 23:175 (1981), and other cell lines capable of expressing a compatible vector, for example, the C127, 3T3, CHO, HeLa and BHK cell lines. Mammalian expression vectors will comprise an origin of replication, a suitable promoter and enhancer, and also any necessary ribosome binding sites, polyadenylation site, splice donor and acceptor sites, transcriptional termination sequences, and 5′ flanking nontranscribed sequences. Such promoters may also be derived from viral sources, such as, e.g., human cytomegalovirus (CMV-IE promoter) or herpes simplex virus type-1 (HSV TK promoter). Nucleic acid sequences derived from the SV40 splice, and polyadenylation sites can be used to provide the required nontranscribed genetic elements.

[0351] Polynucleotides encoding peptides of the invention may also comprise a ubiquitination signal sequence, and/or a targeting sequence such as an endoplasmic reticulum (ER) signal sequence to facilitate movement of the resulting peptide into the endoplasmic reticulum.

[0352] Polynucleotides of the invention, e.g., minigenes, may be expressed in human cells. A human codon usage table can be used to guide the codon choice for each amino acid. Such polynucleotides preferably comprise spacer amino acid residues between variants, such as those described above, or may comprise naturally-occurring flanking sequences adjacent to the variants (and/or CTL and HTL epitopes).

[0353] The peptides of the invention can also be expressed by viral or bacterial vectors. Examples of expression vectors include attenuated viral hosts, such as vaccinia or fowlpox. As an example of this approach, vaccinia virus is used as a vector to express nucleotide sequences that encode the peptides of the invention. Vaccinia vectors and methods useful in immunization protocols are described in, e.g., U.S. Pat. No. 4,722,848. Another vector is BCG (Bacille Calmette Guerin). BCG vectors are described in Stover et al., Nature 351:456-460 (1991). A wide variety of other vectors useful for therapeutic administration or immunization of the polypeptides of the invention, e.g. adeno and adeno-associated virus vectors, retroviral vectors, Salmonella typhi vectors, detoxified anthrax toxin vectors, and the like, will be apparent to those skilled in the art from the description herein. A preferred vector is Modified Vaccinia Ankara (MVA) (e.g., Bavarian Noridic (MVA-BN)).

[0354] Standard regulatory sequences well known to those of skill in the art are preferably included in the vector to ensure expression in the human target cells. Several vector elements are desirable: a promoter with a downstream cloning site for polynucleotide, e.g., minigene insertion; a polyadenylation signal for efficient transcription termination; an E. coli origin of replication; and an E. coli selectable marker (e.g. ampicillin or kanamycin resistance). Numerous promoters can be used for this purpose, e.g., the human cytomegalovirus (hCMV) promoter. See, e.g., U.S. Pat. Nos. 5,580,859 and 5,589,466 for other suitable promoter sequences. A preferred promoter is the CMV-IE promoter.

[0355] Polynucleotides, e.g. minigenes, may comprise one or more synthetic or naturally-occurring introns in the transcribed region. The inclusion of mRNA stabilization sequences and sequences for replication in mammalian cells may also be considered for increasing polynucleotide, e.g. minigene, expression.

[0356] In addition, the polynucleotide, e.g. minigene, may comprise immunostimulatory sequences (ISSs or CpGs). These sequences may be included in the vector, outside the polynucleotide (e.g. minigene) coding sequence to enhance immunogenicity.

[0357] In some embodiments, a bi-cistronic expression vector which allows production of both the polynucleotide- (e.g. minigene-) encoded peptides of the invention and a second protein (e.g., one that modulates immunogenicity) can be used. Examples of proteins or polypeptides that, if co-expressed with peptides of the invention, can enhance an immune response include cytokines (e.g., IL-2, IL-12, GM-CSF), cytokine-inducing molecules (e.g., LeIF), costimulatory molecules, or pan-DR binding proteins (PADRE® molecules, Epimmune, San Diego, Calif.). Helper T cell (HTL) epitopes such as PADRE® molecules can be joined to intracellular targeting signals and expressed separately from expressed peptides of the invention. Specifically decreasing the immune response by co-expression of immunosuppressive molecules (e.g. TGF-β) may be beneficial in certain diseases.

[0358] Once an expression vector is selected, the polynucleotide, e.g. minigene, is cloned into the polylinker region downstream of the promoter. This plasmid is transformed into an appropriate bacterial strain, and DNA is prepared using standard techniques. The orientation and DNA sequence of the polynucleotide, e.g. minigene, as well as all other elements included in the vector, are confirmed using restriction mapping, DNA sequence analysis, and/or PCR analysis. Bacterial cells harboring the correct plasmid can be stored as cell banks.

[0359] Therapeutic/prophylactic quantities of DNA can be produced for example, by fermentation in E. coli, followed by purification. Aliquots from the working cell bank are used to inoculate growth medium, and are grown to saturation in shaker flasks or a bioreactor according to well known techniques. Plasmid DNA is purified using standard bioseparation technologies such as solid phase anion-exchange resins available, e.g., from QIAGEN, Inc. (Valencia, Calif.). If required, supercoiled DNA can be isolated from the open circular and linear forms using gel electrophoresis or other methods.

[0360] Purified polynucleotides, e.g. minigenes, can be prepared for injection using a variety of formulations. The simplest of these is reconstitution of lyophilized polynucleotide, e.g. DNA, in sterile phosphate-buffer saline (PBS). This approach, known as “naked DNA,” is currently being used for intramuscular (IM) administration in clinical trials. To maximize the immunotherapeutic effects of polynucleotide vaccines, alternative methods of formulating purified plasmid DNA may be used. A variety of such methods have been described, and new techniques may become available. Cationic lipids, glycolipids, and fusogenic liposomes can also be used in the formulation (see, e.g. WO 93/24640; Mannino & Gould-Fogerite, BioTechniques 6(7): 682 (1988); U.S. Pat. No. 5,279,833; WO 91/06309; and Felgner, et al., Proc. Natl. Acad. Sci. USA 84:7413 (1987). In addition, peptides and compounds referred to collectively as protective, interactive, non-condensing compounds (PINC) can also be complexed to purified plasmid DNA to influence variables such as stability, intramuscular dispersion, or trafficking to specific organs or cell types.

[0361] Known methods in the art can be used to enhance delivery and uptake of a polynucleotide in vivo. For example, the polynucleotide can be complexed to polyvinylpyrrolidone (PVP), to prolong the localized bioavailability of the polynucleotide, thereby enhancing uptake of the polynucleotide by the organisum (see e.g., U.S. Pat. No. 6,040,295; EP 0 465 529; WO 98/17814). PVP is a polyamide that is known to form complexes with a wide variety of substances, and is chemically and physiologically inert.

[0362] Target cell sensitization can be used as a functional assay of the expression and HLA class I presentation of polynucleotide- (e.g. minigene-) encoded peptides. For example, the polynucleotide, e.g. plasmid DNA, is introduced into a mammalian cell line that is a suitable target for standard CTL chromium release assays. The transfection method used will be dependent on the final formulation. For example, electroporation can be used for “naked” DNA, whereas cationic lipids or PVP-formulated DNA allow direct in vitro transfection. A plasmid expressing green fluorescent protein (GFP) can be co-transfected to allow enrichment of transfected cells using fluorescence activated cell sorting (FACS). The transfected cells are then chromium-51 (⁵¹Cr) labeled and used as targets for epitope-specific CTLs. Cytolysis of the target cells, detected by ⁵¹Cr release, indicates both production and HLA presentation of, polynucleotide-, e.g. minigene-, encoded variants of the invention, or peptides comprising them. Expression of HTL epitopes may be evaluated in an analogous manner using assays to assess HTL activity.

[0363] In vivo immunogenicity is a second approach for functional testing of polynucleotides, e.g. minigenes. Transgenic mice expressing appropriate human HLA proteins are immunized with the polynucleotide, e.g. DNA, product. The dose and route of administration are formulation dependent (e.g., IM for polynucleotide (e.g. naked DNA or PVP-formulated DNA) in PBS, intraperitoneal (IP) for lipid-complexed polynucleotide (e.g., DNA)). Eleven to twenty-one days after immunization, splenocytes are harvested and restimulated for one week in the presence of polynucleotides encoding each peptide being tested. Thereafter, for peptides comprising or consisting of variants, standard assays are conducted to determine if there is cytolysis of peptide-loaded, ⁵¹Cr-labeled target cells. Once again, lysis of target cells that were exposed to variants corresponding to those encoded by the polynucleotide (e.g. minigene) demonstrates polynucleotide (e.g., DNA) vaccine function and induction of CTLs. Immunogenicity of HTL epitopes is evaluated in transgenic mice in an analogous manner.

[0364] Alternatively, the nucleic acids can be administered using ballistic delivery as described, for instance, in U.S. Pat. No. 5,204,253. Using this technique, particles comprised solely of a polynucleotide such as DNA are administered. In a further alternative embodiment for ballistic delivery, polynucleotides such as DNA can be adhered to particles, such as gold particles.

[0365] The use of polynucleotides such as multi-epitope minigenes is described herein and in, e.g. co-pending application U.S. Ser. No. 09/311,784; Ishioka et al., J. Immunol. 162:3915-3925, 1999; An, L. and Whitton, J. L., J. Virol. 71:2292, 1997; Thomson, S. A. et al., J. Immunol. 157:822, 1996; Whitton, J. L. et al., J. Virol. 67:348, 1993; Hanke, R. et al., Vaccine 16:426, 1998. For example, a polynucleotide such as a multi-epitope DNA plasmid can be engineered which encodes an epitope derived from multiple regions of a infectious agent (e.g., p53, HER2/nev, MAGE-2/3, or CEA), a pan-DR binding peptide such as the PADRE® universal helper T cell epitope, and an endoplasmic reticulum-translocating signal sequence. As descibed in the sections above, a peptide/polynucleotide may also comprise/encode epitopes that are derived from other infectious agents.

[0366] Thus, the invention includes peptides as described herein, polynucleotides encoding each of said peptides, as well as compositions comprising the peptides and polynucleotides, and includes methods for producing and methods of using the peptides, polynucleotides, and compositions, as further described below.

[0367] Compositions. In other embodiments, the invention is directed to a composition comprising one or more peptides and/or polynucleotides of the invention and optionally another component(s).

[0368] In some embodiments, the composition comprises or consists of multiple peptides, e.g., 2, 3, 4, 5, 6, 7, 8, or 9 peptides of the invention. In some embodiments, the composition comprises at least 2, at least 3, at least 4, at least 5, at least 6, at least 7, or at least 8 peptides of the invention. Combinations of peptides include, for example, a peptide comprising or alternatively consisting of the Gag 545 variant EPLTSLKSLF (SEQ ID NO:______) and a peptide comprising or alternatively consisting of the Gag 545 variant YPLASLKSLF (SEQ ID NO:______), or combinations of peptides from different tables in Tables 6-9 and/or FIGS. 1A-4.

[0369] Compositions of the invention may comprise polynucleotides encoding the above peptides and/or combinations of peptides.

[0370] The composition can comprise at least 2, at least 3, at least 4, at least 5, at least 6, at least 7, or at least 8 peptides and/or polynucleotides selected from those described above or below. At least one of the one or more peptides can be a heteropolymer or a homopolymer. Additionally, the composition can comprise a CTL and/or HTL epitope, which can be derived from a tumor-associated antigen. The additional epitope can also be a PanDR binding molecule, (e.g., a PADRE® universal helper T cell epitope).

[0371] Optional components include excipients, diluents, proteins such as peptides comprising a CTL epitope, and/or an HTL epitope such as a pan-DR binding peptide (e.g., a PADRE® universal helper T cell epitope), and/or a carrier, polynucleotides encoding such proteins, lipids, or liposomes, as well as other components described herein. There are numerous embodiments of compositions in accordance with the invention, such as a cocktail of one or more peptides and/or polynucleotides (e.g., minigenes); a cocktail of one or more peptides and/or polynucleotides (e.g., minigenes) and one or more CTL and/or HTL epitopes.

[0372] Compositions may comprise one or more peptides (and/or polynucleotides such as minigenes) of the invention, along with one or more other components as described above and herein. “One or more” refers to any whole unit integer from 1-150, e.g., at least 2, 3, 4, 5, 6, 7, 8, 9, 10, 11, 12, 13, 14, 15, 16, 17, 18, 19, 20, 21, 22, 23, 24, 25, 26, 27, 28, 29, 30, 31, 32, 33, 34, 35, 36, 37, 38, 39, 40, 45, 50, 55, 60, 65, 70, 75, 80, 85, 90, 95, 100, 105, 110, 115, 120, 125, 130, 135, 140, 145, or 150 peptides, polynucleotides, or other components.

[0373] Compositions of the invention may be, for example, polynucleotides or polypeptides of the invention combined with or complexed to cationic lipid formulations; lipopeptides (e.g., Vitiello, A. et al., J. Clin. Invest. 95:341, 1995), encapsulated e.g., in poly(DL-lactide-co-glycolide) (“PLG”) microspheres (see, e.g., Eldridge, et al., Molec. Immunol. 28:287-294, 1991: Alonso et al., Vaccine 12:299-306, 1994; Jones et al., Vaccine 13:675-681, 1995); peptide compositions contained in immune stimulating complexes (ISCOMS) (see, e.g., Takahashi et al., Nature 344:873-875, 1990; Hu et al., Clin Exp Immunol. 113:235-243, 1998); multiple antigen peptide systems (MAPs) (see e.g., Tam, J. P., Proc. Natl. Acad. Sci. U.S.A. 85:5409-5413, 1988; Tam, J. P., J. Immunol. Methods 196:17-32, 1996); viral, bacterial, or, fungal delivery vectors (Perkus, M. E. et al., In: Concepts in vaccine development, Kaufmann, S. H. E., ed., p. 379, 1996; Chakrabarti, S. et al., Nature 320:535, 1986; Hu, S. L. et al., Nature 320:537, 1986; Kieny, M.-P. et al., AIDS Bio/Technology 4:790, 1986; Top, F. H. et al., J. Infect. Dis. 124:148, 1971; Chanda, P. K. et al., Virology 175:535, 1990); particles of viral or synthetic origin (e.g., Kofler, N. et al., J. Immunol. Methods. 192:25, 1996; Eldridge, J. H. et al., Sem. Hematol. 30:16, 1993; Falo, L. D., Jr. et al., Nature Med. 7:649, 1995); adjuvants (e.g., incomplete Freund's adjuvant) (Warren, H. S., Vogel, F. R., and Chedid, L. A. Annu. Rev. Immunol. 4:369, 1986; Gupta, R. K. et al., Vaccine 11:293, 1993); liposomes (Reddy, R. et al., J. Immunol. 148:1585, 1992; Rock, K. L., Immunol. Today 17:131, 1996); or, particle-absorbed cDNA or other polynucleotides of the invention (Ulmer, J. B. et al., Science 259:1745, 1993; Robinson, H. L., Hunt, L. A., and Webster, R. G., Vaccine 11:957, 1993; Shiver, J. W. et al., In: Concepts in vaccine development, Kaufmann, S. H. E., ed., p. 423, 1996; Cease, K. B., and Berzofsky, J. A., Annu. Rev. Immunol. 12:923, 1994 and Eldridge, J. H. et al., Sem. Hematol. 30:16, 1993), etc. Toxin-targeted delivery technologies, also known as receptor mediated targeting, such as those of Avant Immunotherapeutics, Inc. (Needham, Mass.) or attached to a stress protein, e.g., HSP 96 (Stressgen Biotechnologies Corp., Victoria, BC, Canada) can also be used.

[0374] Compositions of the invention comprise polynucleotide-mediated modalities. DNA or RNA encoding one or more of the peptides of the invention can be administered to a patient. This approach is described, for instance, in Wolff et. al., Science 247:1465 (1990) as well as U.S. Pat. Nos. 5,580,859; 5,589,466; 5,804,566; 5,739,118; 5,736,524; 5,679,647; and, WO 98/04720. Examples of DNA-based delivery technologies include “naked DNA”, facilitated (bupivicaine, polymers (e.g., PVP, PINC, etc.), peptide-mediated) delivery, cationic lipid complexes, and particle-mediated (“gene gun”) or pressure-mediated delivery (see, e.g., U.S. Pat. No. 5,922,687). Accordingly, peptides of the invention can be expressed by viral or bacterial vectors. Examples of expression vectors include attenuated viral hosts, such as Modified Vaccinia Ankara (MVA) (e.g., Bavarian Noridic), vaccinia or fowlpox. For example, vaccinia virus is used as a vector to express nucleotide sequences that encode the peptides of the invention. Upon introduction into an acutely or chronically infected host or into a non-infected host, the recombinant vaccinia virus expresses the immunogenic peptide, and thereby elicits an immune response. Vaccinia vectors and methods useful in immunization protocols are described in, e.g., U.S. Pat. No. 4,722,848. Another vector is BCG (Bacille Calmette Guerin). BCG vectors are described in Stover et al., Nature 351:456-460 (1991). A wide variety of other vectors useful for therapeutic administration or immunization of the peptides of the invention, e.g. adeno and adeno-associated virus vectors, alpha virus vectors, retroviral vectors, Salmonella typhi vectors, detoxified anthrax toxin vectors, and the like, are apparent to those skilled in the art from the description herein.

[0375] In certain embodiments, components that induce T cell responses are combined with components that induce antibody responses to the target antigen of interest. A preferred embodiment of such a composition comprises class I and class II epitopes in accordance with the invention. Alternatively, a composition comprises a class I and/or class II epitope in accordance with the invention, along with a PADRE® molecule (Epimmune, San Diego, Calif.).

[0376] Compositions of the invention can comprise antigen presenting cells, such as dendritic cells. Antigen presenting cells, e.g., dendritic cells, may be transfected, e.g., with a polynucleotide such as a minigene construct in accordance with the invention, in order to elicit immune responses. The peptide can be bound to an HLA molecule on the antigen-resenting cell, whereby when an HLA-restricted cytotoxic T lymphocyte (CTL) is present, a receptor of the CTL binds to a complex of the HLA molecule and the peptide.

[0377] The compositions of the invention may also comprise antiviral drugs such as interferon-α, or immune adjuvants such as IL-12, GM-CSF, etc.

[0378] Compositions may comprise an HLA heavy chain, β₂-microglobulin, streptavidin, and/or biotin. The streptavidin may be fluorescently labeled. Compositions may comprise tetramers (see e.g., U.S. Pat. No. 5,635,363; Science 274:94-96 (1996)). A tetramer composition comprising an HLA heavy chain, β₂-microglobulin, streptavidin, and biotin. The streptavidin may be fluorescently labeled. Compositions may also comprise dimers. A dimer composition comprises as MHC molecule and an Ig molecule (see e.g., PNAS 95:7568-73 (1998)).

[0379] In some embodiments it may be desirable to include in the compositions of the invention at least one component which primes cytotoxic T lymphocytes. Lipids have been identified as agents capable of priming CTL in vivo against viral antigens. For example, palmitic acid residues can be attached to the ε-and α-amino groups of a lysine residue and then linked, e.g., via one or more linking residues such as Gly, Gly-Gly-, Ser, Ser-Ser, or the like, to an immunogenic peptide. The lipidated peptide can then be administered either directly in a micelle or particle, incorporated into a liposome, or emulsified in an adjuvant, e.g., incomplete Freund's adjuvant. A preferred composition comprises palmitic acid attached to ε- and α-amino groups of Lys, which is attached via linkage, e.g., Ser-Ser, to the amino terminus of the peptide.

[0380] As another example of lipid priming of CTL responses, E. coli lipoproteins, such as tripalmitoyl-S-glycerylcysteinlyseryl-serine (P₃CSS) can be used to prime virus specific CTL when covalently attached to an appropriate peptide (see, e.g., Deres, et al., Nature 342:561, 1989). Peptides of the invention can be coupled to P₃CSS, for example, and the lipopeptide administered to an individual to specifically prime a CTL response to the target antigen. Moreover, because the induction of neutralizing antibodies can also be primed with P₃CSS-conjugated epitopes, two such compositions can be combined to more effectively elicit both humoral and cell-mediated responses.

[0381] Another preferred embodiment is a composition comprising one or more peptides of the invention emulsified in IFA.

[0382] Compositions of the invention may also comprise CTL and/or HTL peptides. Such CTL and HTL peptides can be modified by the addition of amino acids to the termini of a peptide to provide for ease of linking peptides one to another, for coupling to a carrier support or larger peptide, for modifying the physical or chemical properties of the peptide or oligopeptide, or the like. Amino acids such as tyrosine, cysteine, lysine, glutamic or aspartic acid, or naturally or unnaturally occuring amino acid residues, can be introduced at the carboxyl- or amino-terminus of the peptide or oligopeptide, particularly class I peptides. However, it is to be noted that modification at the carboxyl terminus of a CTL epitope may, in some cases, alter binding characteristics of the peptide. In addition, the peptide or oligopeptide sequences can differ from the natural sequence by being modified by terminal-NH₂ acylation, e.g., by alkanoyl (C₁-C₂₀) or thioglycolyl acetylation, terminal-carboxyl amidation, e.g., ammonia, methylamine, etc. In some instances these modifications may provide sites for linking to a support or other molecule. CTL and HTL epitopes may comprise additional amino acids, such as those described above including spacers.

[0383] A further embodiment of a composition in accordance with the invention is an antigen presenting cell that comprises one or more peptides in accordance with the invention. The antigen presenting cell can be a “professional” antigen presenting cell, such as a dendritic cell. The antigen presenting cell can comprise the peptide of the invention by any means known or to be determined in the art. Such means include pulsing of dendritic cells with one or more individual peptides, by nucleic acid administration such as ballistic nucleic acid delivery or by other techniques in the art for administration of nucleic acids, including vector-based, e.g. viral vector, delivery of nucleic acids.

[0384] Compositions may comprise carriers. Carriers that can be used with compositions of the invention are well known in the art, and include, e.g., thyroglobulin, albumins such as human serum albumin, tetanus toxoid, polyamino acids such as poly L-lysine, poly L-glutamic acid, influenza virus proteins, hepatitis B virus core protein, and the like.

[0385] The compositions (e.g. pharmaceutical compositions) can contain a physiologically tolerable diluent such as water, or a saline solution, preferably phosphate buffered saline. Additionally, as disclosed herein, CTL responses can be primed by conjugating peptides of the invention to lipids, such as tripalmitoyl-S-glyceryl-cysteinyl-seryl-serine (P₃CSS).

[0386] Compositions of the invention may be pharmaceutically acceptable compositions. Pharmaceutical compositions preferably contain an immunologically effective amount of one or more peptides and/or polynucleotides of the invention, and optionally one or more other components which are pharmaceutically acceptable. A preferred composition comprises one or more peptides of the invention and IFA. A more preferred composition of the invention comprises one or more peptides of the invention, one or more peptides, and IFA.

[0387] Upon immunization with a peptide and/or polynucleotide and/or composition in accordance with the invention, via injection (e.g., SC, ID, IM), aerosol, oral, transdermal, transmucosal, intrapleural, intrathecal, or other suitable routes, the immune system of the host responds to the vaccine by an immune response comprising the production of antibodies, CTLs and/or HTLs specific for the desired antigen(s). Consequently, the host becomes at least partially immune to subsequent exposure to the infectious agent(s), or at least partially resistant to further development of infectious agent-bearing cells and thereby derives a prophylactic or therapeutic benefit.

[0388] Furthermore, the peptides, primers, and epitopes of the invention can be used in any desired immunization or administration regimen; e.g., as part of periodic vaccinations such as annual vaccinations as in the veterinary arts or as in periodic vaccinations as in the human medical arts, or as in a prime-boost regime wherein an inventive vector or recombinant is administered either before or after the administration of the same or of a different epitope of interest or recombinant or vector expressing such as a same or different epitope of interest (including an inventive recombinant or vector expressing such as a same or different epitope of interest), see, e.g., U.S. Pat. Nos. 5,997,878; 6,130,066; 6,180,398; 6,267,965; and 6,348,450. An useful viral vector of the present invention is Modified Vaccinia Ankara (MVA) (e.g. Bavarian Noridic (MVA-BN)).

[0389] Recent studies have indicated that a prime-boost protocol, whereby immunization with a poxvirus recombinant expressing a foreign gene product is followed by a boost using a purified subunit preparation form of that gene product, elicits an enhanced immune response relative to the response elicited with either product alone. Human volunteers immunized with a vaccinia recombinant expressing the HIV-1 envelope glycoprotein and boosted with purified HIV-1 envelope glycoprotein subunit preparation exhibit higher HIV-1 neutralizing antibody titers than individuals immunized with just the vaccinia recombinant or purified envelope glycoprotein alone (Graham et al., J. Infect. Dis., 167:533-537 (1993); Cooney et al., Proc. Natl. Acad. Sci. USA, 90:1882-1886 (1993)). Humans immunized with two injections of an ALVAC-HIV-1 env recombinant (vCP125) failed to develop BV specific antibodies. Boosting with purified rgp160 from a vaccinia virus recombinant resulted in detectable HIV-1 neutralizing antibodies. Furthermore, specific lymphocyte T cell proliferation to rgp160 was clearly increased by the boost with rgp160. Envelope specific cytotoxic lymphocyte activity was also detected with this vaccination regimen (Pialoux et al., AIDS Res. and Hum. Retroviruses, 11:272-381 (1995)). Macaques immunized with a vaccinia recombinant expressing the simian immunodeficiency virus (SIV) envelope glycoprotein and boosted with SIV envelope glycoprotein from a baculovirus recombinant are protected against SIV challenge (Hu et al., AID Res. and Hum. Retroviruses, 3:615-620 (1991); Hu et al., Science 255:456-459 (1992)). In the same fashion, purified HCMVgB protein can be used in prime-boost protocols with NYVAC or ALVAC-gB recombinants.

[0390] In certain embodiments, the polynucleotides are complexed in a liposome preparation. Liposomal preparations for use in the instant invention include cationic (positively charged), anionic (negatively charged) and neutral preparations. However, cationic liposomes are particularly preferred because a tight charge complex can be formed between the cationic liposome and the polyanionic nucleic acid. Cationic liposomes have been shown to mediate intracellular delivery of plasmid DNA (Felgner et al., Proc. Natl. Acad. Sci. USA 84:74137416 (1987), which is herein incorporated by reference); mRNA (Malone et al., Proc. Natl. Acad. Sci. USA 86:60776081 (1989), which is herein incorporated by reference); and purified transcription factors (Debs et al., J. Biol. Chem. 265:1018910192 (1990), which is herein incorporated by reference), in functional form.

[0391] Cationic liposomes are readily available. For example, N-[12,3-dioleyloxy)-propyl]-N,N,N-triethylammonium (DOTMA) liposomes are particularly useful and are available under the trademark Lipofectin, from GIBCO BRL, Grand Island, N.Y. (See, also, Felgner et al., Proc. Natl. Acad. Sci. USA 84:74137416 (1987)). Other commercially available liposomes include transfectace (DDAB/DOPE) and DOTAP/DOPE (Boehringer).

[0392] Other cationic liposomes can be prepared from readily available materials using techniques well known in the art. See, e.g. PCT Publication No. WO 90/11092 for a description of the synthesis of DOTAP (1,2-bis(oleoyloxy)-3-(trimethylammonio)propane) liposomes. Preparation of DOTMA liposomes is explained in the literature, see, e.g., P. Felgner et al., Proc. Natl. Acad. Sci. USA 84:74137417. Similar methods can be used to prepare liposomes from other cationic lipid materials.

[0393] Similarly, anionic and neutral liposomes are readily available, such as from Avanti Polar Lipids (Birmingham, Ala.), or can be easily prepared using readily available materials. Such materials include phosphatidyl, choline, cholesterol, phosphatidyl ethanolamine, dioleoylphosphatidyl choline (DOPC), dioleoylphosphatidyl glycerol (DOPG), dioleoylphoshatidyl ethanolamine (DOPE), among others. These materials can also be mixed with the DOTMA and DOTAP starting materials in appropriate ratios. Methods for making liposomes using these materials are well known in the art.

[0394] For example, commercially available dioleoylphosphatidyl choline (DOPC), dioleoylphosphatidyl glycerol (DOPG), and dioleoylphosphatidyl ethanolamine (DOPE) can be used in various combinations to make conventional liposomes, with or without the addition of cholesterol. Thus, for example, DOPG/DOPC vesicles can be prepared by drying 50 mg each of DOPG and DOPC under a stream of nitrogen gas into a sonication vial. The sample is placed under a vacuum pump overnight and is hydrated the following day with deionized water. The sample is then sonicated for 2 hours in a capped vial, using a Heat Systems model 350 sonicator equipped with an inverted cup (bath type) probe at the maximum setting while the bath is circulated at 15EC. Alternatively, negatively charged vesicles can be prepared without sonication to produce multilamellar vesicles or by extrusion through nucleopore membranes to produce unilamellar vesicles of discrete size. Other methods are known and available to those of skill in the art.

[0395] The liposomes can comprise multilamellar vesicles (MLVs), small unilamellar vesicles (SUVs), or large unilamellar vesicles (LUVs), with SUVs being preferred. The various liposome nucleic acid complexes are prepared using methods well known in the art. See, e.g., Straubinger et al., Methods of Immunology 101:512527 (1983). For example, MLVs containing nucleic acid can be prepared by depositing a thin film of phospholipid on the walls of a glass tube and subsequently hydrating with a solution of the material to be encapsulated. SUVs are prepared by extended sonication of MLVs to produce a homogeneous population of unilamellar liposomes. The material to be entrapped is added to a suspension of preformed MLVs and then sonicated. When using liposomes containing cationic lipids, the dried lipid film is resuspended in an appropriate solution such as sterile water or an isotonic buffer solution such as 10 mM Tris/NaCl, sonicated, and then the preformed liposomes are mixed directly with the DNA. The liposome and DNA form a very stable complex due to binding of the positively charged liposomes to the cationic DNA. SUVs find use with small nucleic acid fragments. LUVs are prepared by a number of methods, well known in the art. Commonly used methods include Ca²⁺-EDTA chelation (Papahadjopoulos et al., Biochim. Biophys. Acta 394:483 (1975); Wilson et al, Cell 17:77 (1979)); ether injection (Deamer, D. and Bangham, A., Biochim. Biophys. Acta 443:629 (1976); Ostro et al., Biochem. Biophys. Res. Commun. 76:836 (1977); Fraley et al., Proc. Natl. Acad. Sci. USA 76:3348 (1979)); detergent dialysis (Enoch, H. and Strittmatter, P., Proc. Natl. Acad. Sci. USA 76:145 (1979)); and reversephase evaporation (REV) (Fraley et al., J. Biol. Chem. 255:10431 (1980); Szoka, F. and Papahadjopoulos, D., Proc. Natl. Acad. Sci. USA 75:145 (1978); SchaeferRidder et al., Science 215:166 (1982)).

[0396] Generally, the ratio of DNA to liposomes will be from about 10:1 to about 1:10. Preferably, the ration will be from about 5:1 to about 1:5. More preferably, the ration will be about 3:1 to about 1:3. Still more preferably, the ratio will be about 1:1.

[0397] U.S. Pat. No. 5,676,954 reports on the injection of genetic material, complexed with cationic liposome carriers, into mice. U.S. Pat. Nos. 4,897,355, 4,946,787, 5,049,386, 5,459,127, 5,589,466, 5,693,622, 5,580,859, 5,703,055, and international publication no. WO 94/9469 provide cationic lipids for use in transfecting DNA into cells and mammals. U.S. Pat. Nos. 5,589,466, 5,693,622, 5,580,859, 5,703,055, and international publication no. WO 94/9469 provide methods for delivering DNA-cationic lipid complexes to mammals.

Binding Affinity of Variants for HLA Molecules

[0398] As indicated herein, the large degree of HLA polymorphism is an important factor to be taken into account with the epitope-based approach to developing therapeutics and diagnostics. To address this factor, epitope selection encompassing identification of peptides capable of binding at high or intermediate affinity to multiple HLA molecules is preferably utilized, most preferably these epitopes bind at high or intermediate affinity to two or more allele-specific HLA molecules. However, in some embodiments, it is preferred that all epitopes in a given composition bind to the alleles of a single HLA supertype or a single HLA molecule.

[0399] Variants of the invention preferably include those that have an IC₅₀ or binding affinity value for a class I HLA molecule(s) of 500 nM or better (i.e., the value is ≦500 nM). In certain embodiments of the invention, peptides of interest have an IC₅₀ or binding affinity value for a class I HLA molecule(s) of 200 nM or better. In certain embodiments of the invention, peptides of interest, such as A1 and A24 peptides, have an IC₅₀ or binding affinity value for a class I HLA molecule(s) of 100 nM or better. If HTL epitopes are included, they preferably are HTL epitopes that have an IC₅₀ or binding affinity value for class II HLA molecules of 1000 nM or better, (i.e., the value is ≦1,000 nM). For example, peptide binding is assessed by testing the capacity of a candidate peptide to bind to a purified HLA molecule in vitro. Peptides exhibiting high or intermediate affinity are then considered for further analysis. Selected peptides are generally tested on other members of the supertype family. In preferred embodiments, peptides that exhibit cross-reactive binding are then used in cellular screening analyses or vaccines.

[0400] The relationship between binding affinity for HLA class I molecules and immunogenicity of discrete peptide epitopes on bound antigens was determined for the first time by inventors at Epimmune. As disclosed in greater detail herein, higher HLA binding affinity is correlated with greater immunogenicity.

[0401] Greater immunogenicity can be manifested in several different ways. Immunogenicity corresponds to whether an immune response is elicited at all, and to the vigor of any particular response, as well as to the extent of a population in which a response is elicited. For example, a peptide might elicit an immune response in a diverse array of the population, yet in no instance produce a vigorous response. In accordance with these principles, close to 90% of high binding peptides have been found to elicit a response and thus be “immunogenic,” as contrasted with about 50% of the peptides that bind with intermediate affinity. (See, e.g., Schaeffer et al. PNAS (1988)) High affinity-binding class I peptides generally have an affinity of less than or equal to 100 nM. Moreover, not only did peptides with higher binding affinity have an enhanced probability of generating an immune response, the generated response tended to be more vigorous than the response seen with weaker binding peptides. As a result, less peptide is required to elicit a similar biological effect if a high affinity binding peptide is used rather than a lower affinity one. Thus, in some preferred embodiments of the invention, high affinity binding epitopes are used.

[0402] The correlation between binding affinity and immunogenicity was analyzed by the present inventors by two different experimental approaches (see, e.g., Sette, et al., J. Immunol. 153:5586-5592 (1994)). In the first approach, the immunogenicity of potential epitopes ranging in HLA binding affinity over a 10,000-fold range was analyzed in HLA-A*0201 transgenic mice. In the second approach, the antigenicity of approximately 100 different hepatitis B virus (HIV)-derived potential epitopes, all carrying A*0201 binding motifs, was assessed by using PBL from acute hepatitis patients. Pursuant to these approaches, it was determined that an affinity threshold value of approximately 500 nM (preferably 50 nM or less) determines the capacity of a peptide epitope to elicit a CTL response. These data are true for class I binding affinity measurements for naturally processed peptides and for synthesized T cell epitopes. These data also indicate the important role of determinant selection in the shaping of T cell responses (see, e.g., Schaeffer et al. Proc. Natl. Acad. Sci. USA 86:4649-4653 (1989)).

[0403] An affinity threshold associated with immunogenicity in the context of HLA class II (i.e., HLA DR) molecules has also been delineated (see, e.g., Southwood et al. J. Immunology 160:3363-3373 (1998), and U.S. Pat. No. 6,413,527, issued Jul. 2, 2002). In order to define a biologically significant threshold of HLA class II binding affinity, a database of the binding affinities of 32 DR-restricted epitopes for their restricting element (i.e., the HLA molecule that binds the epitope) was compiled. In approximately half of the cases (15 of 32 epitopes), DR restriction was associated with high binding affinities, i.e. binding affinity values of 100 nM or less. In the other half of the cases (16 of 32), DR restriction was associated with intermediate affinity (binding affinity values in the 100-1000 nM range). In only one of 32 cases was DR restriction associated with an IC₅₀ of 1000 nM or greater. Thus, 1000 nM is defined as an affinity threshold associated with immunogenicity in the context of DR molecules.

[0404] The binding affinity of peptides for HLA molecules can be determined as described in Example 1, below.

Enhancing Population Coverage of the Vaccine

[0405] The primary anchor residues of the HLA class I peptide epitope supermotifs and motifs are summarized in Tables 1-2. Allele-specific HLA molecules that are comprised by the various HLA class I supertypes are listed in Table 4. In some cases, patterns of amino acid residues are present in both a motif and a supermotif. The relationship of a particular motif and any related supermotif is indicated in the description of the individual motifs.

[0406] By inclusion of one or more, epitopes from several motifs or supermotifs in a vaccine composition, enhanced population coverage for major global ethnicities can be obtained.

Assays to Detect T-Cell Responses

[0407] Once HLA binding peptides are identified, they can be tested for the ability to elicit a T-cell response. The preparation and evaluation of motif-bearing peptides are described, e.g., in PCT publications WO 94/20127 and WO 94/03205. Briefly, peptides comprising epitopes from a particular antigen are synthesized and tested for their ability to bind to relevant HLA proteins. These assays may involve evaluation of peptide binding to purified HLA class I molecules in relation to the binding of a radioiodinated reference peptide. Alternatively, cells expressing empty class I molecules (i.e. cell surface HLA molecules that lack any bound peptide) may be evaluated for peptide binding by immunofluorescent staining and flow microfluorimetry. Other assays that may be used to evaluate peptide binding include peptide-dependent class I assembly assays and/or the inhibition of CTL recognition by peptide competition. Those peptides that bind to an HLA class I molecule, typically with an affinity of 500 nM or less, are further evaluated for their ability to serve as targets for CTLs derived from infected or immunized individuals, as well as for their capacity to induce primary in vitro or in vivo CTL responses that can give rise to CTL populations capable of reacting with selected target cells associated with pathology.

[0408] Analogous assays are used for evaluation of HLA class II binding peptides. HLA class II motif-bearing peptides that are shown to bind, typically at an affinity of 1000 nM or less, are further evaluated for the ability to stimulate HTL responses.

[0409] Conventional assays utilized to detect T cell responses include proliferation assays, lymphokine secretion assays, direct cytotoxicity assays, and limiting dilution assays. For example, antigen-presenting cells that have been incubated with a peptide can be assayed for the ability to induce CTL responses in responder cell populations. Antigen-presenting cells can be normal cells such as peripheral blood mononuclear cells or dendritic cells. Alternatively, mutant, non-human mammalian cell lines that have been transfected with a human class I MHC gene, and that are deficient in their ability to load class I molecules with internally processed peptides, are used to evaluate the capacity of the peptide to induce in vitro primary CTL responses. Peripheral blood mononuclear cells (PBMCs) can be used as the source of CTL precursors. Antigen presenting cells are incubated with peptide, after which the peptide-loaded antigen-presenting cells are then incubated with the responder cell population under optimized culture conditions. Positive CTL activation can be determined by assaying the culture for the presence of CTLs that lyse radio-labeled target cells, either specific peptide-pulsed targets or target cells that express endogenously processed antigen from which the specific peptide was derived. Alternatively, the presence of epitope-specific CTLs can be determined by IFNγ in situ ELISA.

[0410] In an embodiment of the invention, directed to diagnostics, a method has been devised which allows direct quantification of antigen-specific T cells by staining with fluorescein-labelled HLA tetrameric complexes (Altman, J. D. et al., Proc. Natl. Acad. Sci. USA 90:10330, 1993; Altman, J. D. et al., Science 274:94, 1996). Other options include staining for intracellular lymphokines, and interferon release assays or ELISPOT assays. Tetramer staining, intracellular lymphokine staining and ELISPOT assays all appear to be at least 10-fold more sensitive than more conventional assays (Lalvani, A. et al., J. Exp. Med. 186:859, 1997; Dunbar, P. R. et al., Curr. Biol. 8:413, 1998; Murali-Krishna, K. et al., Immunity 8:177, 1998). Additionally, DimerX technology can be used as a means of quantitation (see, e.g., Science 274:94-99 (1996) and Proc. Natl. Acad. Sci. 95:7568-73 (1998)).

[0411] HTL activation may also be assessed using techniques known to those in the art, such as T cell proliferation or lymphokine secretion (see, e.g. Alexander et al., Immunity 1:751-761, 1994).

[0412] Alternatively, immunization of HLA transgenic mice can be used to determine immunogenicity of peptide epitopes. Several transgenic mouse strains, e.g., mice with human A2.1, A11 (which can additionally be used to analyze HLA-A3 epitopes), and B7 alleles have been characterized. Other transgenic mice strains (e.g. transgenic mice for HLA-A1 and A24) are being developed. Moreover, HLA-DR1 and HLA-DR3 mouse models have been developed. In accordance with principles in the art, additional transgenic mouse models with other HLA alleles are generated as necessary.

[0413] Such mice can be immunized with peptides emulsified in Incomplete Freund's Adjuvant; thereafter any resulting T cells can be tested for their capacity to recognize target cells that have been peptide-pulsed or transfected with genes encoding the peptide of interest. CTL responses can be analyzed using cytotoxicity assays described above. Similarly, HTL responses can be analyzed using, e.g., T cell proliferation or lymphokine secretion assays.

Minigenes

[0414] A number of different approaches are available which allow simultaneous delivery of multiple epitopes. Nucleic acids encoding multiple epitopes are a useful embodiment of the invention; discrete peptide epitopes or polyepitopic peptides can be encoded. The epitopes to be included in a minigene are preferably selected according to the guidelines set forth in the previous section. Examples of amino acid sequences that can be included in a minigene include: HLA class I epitopes, HLA class II epitopes, a ubiquitination signal sequence, and/or a targeting sequence such as an endoplasmic reticulum (ER) signal sequence to facilitate movement of the resulting peptide into the endoplasmic reticulum. Examples of minigene constructs are shown in Tables 23-28.

[0415] The use of multi-epitope minigenes is also described in, e.g. co-pending applications U.S. Ser. No. 09/311,784, 09/894,018, 60/419,973, 60/415,463; Ishioka et al., J. Immunol. 162:3915-3925, 1999; An, L. and Whitton, J. L., J. Virol. 71:2292, 1997; Thomson, S. A. et al., J. Immunol. 157:822, 1996; Whitton, J. L. et al., J. Virol 67:348, 1993; Hanke, R. et al., Vaccine 16:426, 1998. For example, a multi-epitope DNA plasmid encoding nine dominant HLA-A*0201- and A11-restricted CTL epitopes derived from the polymerase, envelope, and core proteins of HIV and human immunodeficiency virus (HIV), a PADRE® universal helper T cell (HTL) epitope, and an endoplasmic reticulum-translocating signal sequence has been engineered. Immunization of HLA transgenic mice with this plasmid construct resulted in strong CTL induction responses against the nine CTL epitopes tested. This CTL response was similar to that observed with a lipopeptide of known immunogenicity in humans, and significantly greater than immunization using peptides in oil-based adjuvants. Moreover, the immunogenicity of DNA-encoded epitopes in vitro was also correlated with the in vitro responses of specific CTL lines against target cells transfected with the DNA plasmid. These data show that the minigene served: 1.) to generate a CTL response and 2.) to generate CTLs that recognized cells expressing the encoded epitopes. A similar approach can be used to develop minigenes encoding epitopes of an infectious agent.

[0416] For example, to create a DNA sequence encoding the selected epitopes (minigene) for expression in human cells, the amino acid sequences of the epitopes may be reverse translated. A human codon usage table can be used to guide the codon choice for each amino acid. These epitope-encoding DNA sequences may be directly adjoined, so that when translated, a continuous peptide sequence is created. However, to optimize expression and/or immunogenicity, additional elements can be incorporated into the minigene design such as spacer amino acid residues between epitopes. HLA presentation of CTL and HTL epitopes may be improved by including synthetic (e.g. poly-alanine) or naturally-occurring flanking sequences adjacent to the CTL or HTL epitopes; these larger peptides comprising the epitope(s) are within the scope of the invention. In one embodiment, spacer amino acid residues between one or more CTL and/or HTL epitopes are designed so as to minimize junctional epitopes that may result from the juxtaposition of 2 CTL and/or HTL epitopes.

[0417] The minigene sequence may be converted to DNA by assembling oligonucleotides that encode the plus and minus strands of the minigene. Overlapping oligonucleotides (30-100 bases long) may be synthesized, phosphorylated, purified and annealed under appropriate conditions using well known techniques. The ends of the oligonucleotides can be joined, for example, using T4 DNA ligase. This synthetic minigene, encoding the epitope peptide, can then be cloned into a desired expression vector.

[0418] Standard regulatory sequences well known to those of skill in the art are preferably included in the vector to ensure expression in the target cells. Several vector elements are desirable: a promoter with a downstream cloning site for minigene insertion; a polyadenylation signal for efficient transcription termination; an E. coli origin of replication; and an E. coli selectable marker (e.g. ampicillin or kanamycin resistance). Numerous promoters can be used for this purpose, e.g., the human cytomegalovirus (hCMV) CMV-IE promoter. See, e.g., U.S. Pat. Nos. 5,580,859 and 5,589,466 for other suitable promoter sequences.

[0419] Optimized peptide expression and immunogenicity can be achieved by certain modifications to a minigene construct. For example, in some cases introns facilitate efficient gene expression, thus one or more synthetic or naturally-occurring introns can be incorporated into the transcribed region of the minigene. The inclusion of mRNA stabilization sequences and sequences for replication in mammalian cells may also be considered for increasing minigene expression.

[0420] Once an expression vector is selected, the minigene is cloned into the polylinker region downstream of the promoter. This plasmid is transformed into an appropriate bacterial strain, and DNA is prepared using standard techniques. The orientation and DNA sequence of the minigene, as well as all other elements included in the vector, are confirmed using restriction mapping, PCR and/or DNA sequence analysis. Bacterial cells harboring the correct plasmid can be stored as cell banks.

[0421] In addition, immunostimulatory sequences (ISSs or CpGs) appear to play a role in the immunogenicity of DNA vaccines. These sequences may be included in the vector, outside the minigene coding sequence to enhance immunogenicity.

[0422] In some embodiments, a bi-cistronic expression vector which allows production of both the minigene-encoded epitopes and a second protein (e.g. one that modulates immunogenicity) can be used. Examples of proteins or polypeptides that, if co-expressed with epitopes, can enhance an immune response include cytokines (e.g., IL-2, IL-12, GM-CSF), cytokine-inducing molecules (e.g., LeIF), costimulatory molecules, or pan-DR binding proteins (PADRE®, Epimmune, San Diego, Calif.). Helper T cell (HTL) epitopes such as PADRE® molecules can be joined to intracellular targeting signals and expressed separately from expressed CTL epitopes. This can be done in order to direct HTL epitopes to a cell compartment different than that of the CTL epitopes, one that provides for more efficient entry of HTL epitopes into the HLA class II pathway, thereby improving HTL induction. In contrast to HTL or CTL induction, specifically decreasing the immune response by co-expression of immunosuppressive molecules (e.g. TGF-β) may be beneficial in certain diseases.

[0423] Therapeutic quantities of plasmid DNA can be produced for example, by fermentation in E. coli, followed by purification. Aliquots from the working cell bank are used to inoculate growth medium, and are grown to saturation in shaker flasks or a bioreactor according to well known techniques. Plasmid DNA is purified using standard bioseparation technologies such as solid phase anion-exchange resins available, e.g., from QIAGEN, Inc. (Valencia, Calif.). If required, supercoiled DNA can be isolated from the open circular and linear forms using gel electrophoresis or other methods.

[0424] Purified plasmid DNA can be prepared for injection using a variety of formulations. The simplest of these is reconstitution of lyophilized DNA in sterile phosphate-buffer saline (PBS). This approach, known as “naked DNA,” is currently being used for intramuscular (IM) administration in clinical trials. To maximize the immunotherapeutic effects of minigene vaccines, alternative methods of formulating purified plasmid DNA may be used. A variety of such methods have been described, and new techniques may become available. Cationic lipids, glycolipids, and fusogenic liposomes can also be used in the formulation (see, e.g., WO 93/24640; Mannino & Gould-Fogerite, BioTechniques 6(7): 682 (1988); U.S. Pat. No. 5,279,833; WO 91/06309; and Felgner, et al., Proc. Nat'l Acad. Sci. USA 84:7413 (1987). In addition, peptides and compounds referred to collectively as protective, interactive, non-condensing compounds (PINC) can also be complexed to purified plasmid DNA to influence variables such as stability, intramuscular dispersion, or trafficking to specific organs or cell types.

[0425] Known methods in the art can be used to enhance delivery and uptake of a polynucleotide in vivo. For example, the polynucleotide can be complexed to polyvinylpyrrolidone (PVP), to prolong the localized bioavailability of the polynucleotide, thereby enhancing uptake of the polynucleotide by the organisum (see e.g. U.S. Pat. No. 6,040,295; EP 0 465 529; WO 98/17814). PVP is a polyamide that is known to form complexes with a wide variety of substances, and is chemically and physiologically inert.

[0426] Target cell sensitization can be used as a functional assay of the expression and HLA class I presentation of minigene-encoded epitopes. For example, the plasmid DNA is introduced into a mammalian cell line that is a suitable target for standard CTL chromium release assays. The transfection method used will be dependent on the final formulation, electroporation can be used for “naked” DNA, whereas cationic lipids or DNA:PVP compositions allow direct in vitro transfection. A plasmid expressing green fluorescent protein (GFP) can be co-transfected to allow enrichment of transfected cells using fluorescence activated cell sorting (FACS). The transfected cells are then chromium-51 (⁵¹Cr) labeled and used as targets for epitope-specific CTLs. Cytolysis of the target cells, detected by ⁵¹Cr release, indicates both the production and HLA presentation of, minigene-encoded CTL epitopes. Expression of HTL epitopes may be evaluated in an analogous manner using assays to assess HTL activity.

[0427] In vivo immunogenicity is a second approach for functional testing of minigene DNA formulations. Transgenic mice expressing appropriate human HLA proteins are immunized with the DNA product. The dose and route of administration are formulation dependent (e.g., IM for DNA in PBS, intraperitoneal (IP) for lipid-complexed DNA). Eleven to twenty-one days after immunization, splenocytes are harvested and restimulated for one week in the presence of peptides encoding each epitope being tested. Thereafter, for CTLs, standard assays are conducted to determine if there is cytolysis of peptide-loaded, ⁵¹Cr-labeled target cells. Once again, lysis of target cells that were exposed to epitopes corresponding to those in the minigene, demonstrates DNA vaccine function and induction of CTLs. Immunogenicity of HTL epitopes is evaluated in transgenic mice in an analogous manner.

[0428] Alternatively, the nucleic acids can be administered using ballistic delivery as described, for instance, in U.S. Pat. No. 5,204,253. Using this technique, particles comprised solely of DNA are administered. In a further alternative embodiment for ballistic delivery, DNA can be adhered to particles, such as gold particles.

Vaccine Compositions

[0429] Vaccines that contain an immunologically effective amount of one or more peptides or polynucleotides of the invention are a further embodiment of the invention. The peptides can be delivered by various means or formulations, all collectively referred to as “vaccine” compositions. Such vaccine compositions, and/or modes of administration, can include, for example, naked DNA, DNA formulated with PVP, DNA in cationic lipid formulations; lipopeptides (e.g., Vitiello, A. et al., J. Clin. Invest. 95:341, 1995), DNA or peptides, encapsulated e.g., in poly(DL-lactide-co-glycolide) (“PLG”) microspheres (see, e.g., Eldridge, et al., Molec. Immunol. 28:287-294, 1991: Alonso et al., Vaccine 12:299-306, 1994; Jones et al.., Vaccine 13:675-681, 1995); peptide compositions contained in immune stimulating complexes (ISCOMS) (see, e.g., Takahashi et al., Nature 344:873-875, 1990; Hu et al., Clin Exp Immunol. 113:235-243, 1998); multiple antigen peptide systems (MAPs) (see e.g., Tam, J. P., Proc. Natl. Acad. Sci. U.S.A. 85:5409-5413, 1988; Tam, J. P., J. Immunol. Methods 196:17-32, 1996); viral, bacterial, or, fungal delivery vectors (Perkus, M. E. et al., In: Concepts in vaccine development, Kaufmann, S. H. E., ed., p. 379, 1996; Chakrabarti, S. et al., Nature 320:535, 1986; Hu, S. L. et al., Nature 320:537, 1986; Kieny, M.-P. et al., AIDS Bio/Technology 4:790, 1986; Top, F. H. et al., J. Infect. Dis. 124:148, 1971; Chanda, P. K. et al., Virology 175:535, 1990); particles of viral or synthetic origin (e.g., Kofler, N. et al, J. Immunol. Methods. 192:25, 1996; Eldridge, J. H. et al., Sem. Hematol. 30:16, 1993; Falo, L. D., Jr. et al., Nature Med. 7:649, 1995); adjuvants (e.g., incomplete freund's advjuvant) (Warren, H. S., Vogel, F. R., and Chedid, L. A. Annu. Rev. Immunol. 4:369, 1986; Gupta, R. K. et al., Vaccine 11:293, 1993); liposomes (Reddy, R. et al., J. Immunol. 148:1585, 1992; Rock, K. L., Immunol. Today 17:131, 1996); or, particle-absorbed DNA (Ulmer, J. B. et al., Science 259:1745, 1993; Robinson, H. L., Hunt, L. A., and Webster, R. G., Vaccine 11:957, 1993; Shiver, J. W. et al., In: Concepts in vaccine development, Kaufmann, S. H. E., ed., p. 423, 1996; Cease, K. B., and Berzofsky, J. A., Annu. Rev. Immunol. 12:923, 1994 and Eldridge, J. H. et al., Sem. Hematol. 30:16, 1993), etc. Toxin-targeted delivery technologies, also known as receptor mediated targeting, such as those of Avant Immunotherapeutics, Inc. (Needham, Mass.) or attached to a stress protein, e.g., HSP 96 (Stressgen Biotechnologies Corp., Victoria, BC, Canada) can also be used.

[0430] Vaccines of the invention comprise nucleic acid mediated modalities. DNA or RNA encoding one or more of the peptides of the invention can be administered to a patient. This approach is described, for instance, in Wolff et. al., Science 247:1465 (1990) as well as U.S. Pat. Nos. 5,580,859; 5,589,466; 5,804,566; 5,739,118; 5,736,524; 5,679,647; and, WO 98/04720. Examples of DNA-based delivery technologies include “naked DNA”, facilitated (bupivicaine, polymers (e.g., PVP), peptide-mediated) delivery, cationic lipid complexes, and particle-mediated (“gene gun”) or pressure-mediated delivery (see, e.g., U.S. Pat. No. 5,922,687). Accordingly, peptide vaccines of the invention can be expressed by viral or bacterial vectors. Examples of expression vectors include attenuated viral hosts, such as vaccinia or fowlpox. For example, vaccinia virus is used as a vector to express nucleotide sequences that encode the peptides of the invention (e.g., MVA). Upon introduction into an acutely or chronically infected host or into a non-infected host, the recombinant vaccinia virus expresses the immunogenic peptide, and thereby elicits an immune response. Vaccinia vectors and methods useful in immunization protocols are described in, e.g., U.S. Pat. No. 4,722,848. Another vector is BCG (Bacille Calmette Guerin). BCG vectors are described in Stover et al., Nature 351:456-460 (1991). A wide variety of other vectors useful for therapeutic administration or immunization of the peptides of the invention, e.g. adeno and adeno-associated virus vectors, alpha virus vectors, retroviral vectors, Salmonella typhi vectors, detoxified anthrax toxin vectors, and the like, are apparent to those skilled in the art from the description herein.

[0431] Furthermore, vaccines in accordance with the invention can comprise one or more peptides of the invention. Accordingly, a peptide can be present in a vaccine individually; alternatively, the peptide can exist as a homopolymer comprising multiple copies of the same peptide, or as a heteropolymer of various peptides. Polymers have the advantage of increased probability for immunological reaction and, where different peptide epitopes are used to make up the polymer, the ability to induce antibodies and/or T cells that react with different antigenic determinants of the antigen targeted for an immune response. The composition may be a naturally occurring region of an antigen or can be prepared, e.g., recombinantly or by chemical synthesis.

[0432] Carriers that can be used with vaccines of the invention are well known in the art, and include, e.g., thyroglobulin, albumins such as human serum albumin, tetanus toxoid, polyamino acids such as poly L-lysine, poly L-glutamic acid, influenza virus proteins, hepatitis B virus core protein, and the like. The vaccines can contain a physiologically tolerable diluent such as water, or a saline solution, preferably phosphate buffered saline. Generally, the vaccines also include an adjuvant. Adjuvants such as incomplete Freund's adjuvant, aluminum phosphate, aluminum hydroxide, or alum are examples of materials well known in the art. Additionally, as disclosed herein, CTL responses can be primed by conjugating peptides of the invention to lipids, such as tripalmitoyl-S-glyceryl-cysteinyl-seryl-serine (P₃CSS).

[0433] Upon immunization with a peptide composition in accordance with the invention, via injection (e.g., SC, ID, IM), aerosol, oral, transdermal, transmucosal, intrapleural, intrathecal, or other suitable routes, the immune system of the host responds to the vaccine by producing antibodies, CTLs and/or HTLs specific for the desired antigen. Consequently, the host becomes at least partially immune to subsequent exposure to the infectious agent, and thereby derives a prophylactic or therapeutic benefit.

[0434] In certain embodiments, components that induce T cell responses are combined with components that induce antibody responses to the target antigen of interest. A preferred embodiment of such a composition comprises class I and class II epitopes in accordance with the invention. Alternatively, a composition comprises a class I and/or class II epitope in accordance with the invention, along with a PADRE® molecule (Epimmune, San Diego, Calif.).

[0435] Vaccines of the invention can comprise antigen presenting cells, such as dendritic cells, as a vehicle to present peptides of the invention. For example, dendritic cells are transfected, e.g., with a minigene construct in accordance with the invention, in order to elicit immune responses. Minigenes are discussed in greater detail in a following section. Vaccine compositions can be created in vitro, following dendritic cell mobilization and harvesting, whereby loading of dendritic cells occurs in vitro.

[0436] The vaccine compositions of the invention may also be used in combination with antiviral drugs such as interferon-α, or immune adjuvants such as IL-12, GM-CSF, etc.

[0437] Preferably, the following principles are utilized when selecting epitope(s) and/or analogs for inclusion in a vaccine, either peptide-based or nucleic acid-based formulations. Exemplary variants that may be utilized in a vaccine to treat or prevent infectious agent-mediated disease are set out in Tables 6-9 and FIGS. 1A-4. Each of the following principles can be balanced in order to make the selection. When multiple epitopes are to be used in a vaccine, the epitopes may be, but need not be, contiguous in sequence in the native antigen from which the epitopes are derived. Such multiple epitotes can refer to the order of epitopes within a peptide, or to the selection of epitopes that come from the same reagion, for use in either individual peptides or in a multi-epitopic peptide.

[0438] 1.) Variants are selected which, upon administration, mimic immune responses that have been observed to be correlated with prevention or clearance of infectious disease. For HLA Class I, this generally includes 3-7 variants from at least one infectious agent or antigen thereof.

[0439] 2.) Variants are selected that have the requisite binding affinity established to be correlated with immunogenicity: for HLA Class I an IC₅₀ of 500 nM or less, or for Class II an IC₅₀ of 1000 nM or less. For HLA Class I it is presently preferred to select a peptide having an IC₅₀ of 200 nM or less, as this is believed to better correlate not only to induction of an immune response, but to in vitro tumor cell killing as well. For HLA A1 and A24, it is especially preferred to select a peptide having an IC₅₀ of 100 nM or less.

[0440] 3.) Supermotif bearing-variants, or a sufficient array of allele-specific motif-bearing variants, are selected to give broad population coverage. In general, it is preferable to have at least 80% population coverage. A Monte Carlo analysis, a statistical evaluation known in the art, can be employed to assess the breadth of population coverage.

[0441] 4.) Of particular relevance are “nested epitopes.” Nested epitopes occur where at least two epitopes overlap in a given peptide sequence. For example, a nested epitope can be a fragment of an antigen from a region that contains multiple epitopes that are overleapping, or one epitope that is completely encompassed by another, e.g., A2 peptides MAGE3.159 and MAGE3.160 are nested epitopes. A peptide comprising “transcendent nested epitopes” is a peptide that has both HLA class I and HLA class II epitopes in it. When providing nested epitopes, it is preferable to provide a sequence that has the greatest number of epitopes per provided sequence. Preferably, one avoids providing a peptide that is any longer than the amino terminus of the amino terminal epitope and the carboxyl terminus of the carboxyl terminal epitope in the peptide. When providing a sequence comprising nested epitopes, it is important to evaluate the sequence in order to insure that it does not have pathological or other deleterious biological properties; this is particularly relevant for vaccines directed to infectious organisms.

[0442] 5.) If a protein with multiple epitopes or a polynucleotide (e.g., minigene) is created, an objective is to generate the smallest peptide that encompasses the epitopes of interest. This principle is similar, if not the same as that employed when selecting a peptide comprising nested epitopes. However, with an artificial peptide comprising multipe epitopes, the size minimization objective is balanced against the need to integrate any spacer sequences between epitopes in the polyepitopic protein. Spacer amino acid residues can be introduced to avoid junctional epitopes (an epitope recognized by the immune system, not present in the target antigen, and only created by the man-made juxtaposition of epitopes), or to facilitate cleavage between epitopes and thereby enhance epitope presentation. Junctional epitopes are generally to be avoided because the recipient may generate an immune response to that non-native epitope. Of particular concern is a junctional epitope that is a “dominant epitope.” A dominant epitope may lead to such a zealous response that immune responses to other epitopes are diminished or suppressed.

[0443] The principles are the same, except junctional epitopes applies to the sequences surrounding the epitope. One must also take care with other sequences in construct to avoid immune response.

[0444] T Cell Priming Materials

[0445] In some embodiments it may be desirable to include in the pharmaceutical compositions of the invention at least one component which primes cytotoxic T lymphocytes. Lipids have been identified as agents capable of facilitating the priming in vitro CTL response against viral antigens. For example, palmitic acid residues can be attached to the ε- and α-amino groups of a lysine residue and then linked to an immunogenic peptide. One or more linking moieties can be used such as Gly, Gly-Gly-, Ser, Ser-Ser, or the like. The lipidated peptide can then be administered directly in a micelle or particle, incorporated into a liposome, or emulsified in an adjuvant, e.g., incomplete Freund's adjuvant. A preferred immunogenic composition comprises palmitic acid attached to ε- and α-amino groups of Lys via a linking moiety, e.g., Ser-Ser, added to the amino terminus of an immunogenic peptide.

[0446] In another embodiment of lipid-facilitated priming of CTL responses, E. coli lipoproteins, such as tripalmitoyl-S-glyceryl-cysteinyl-seryl-serine (P₃CSS) can be used to prime CTL when covalently attached to an appropriate peptide. (See, e.g., Deres, et al., Nature 342:561, 1989). Thus, peptides of the invention can be coupled to P₃CSS, and the lipopeptide administered to an individual to specifically prime a CTL response to the target antigen. Moreover, because the induction of neutralizing antibodies can also be primed with P₃CSS-conjugated epitopes, two such compositions can be combined to elicit both humoral and cell-mediated responses.

[0447] Dendritic Cells Pulsed with CTL and/or HTL Peptides

[0448] An embodiment of a vaccine composition in accordance with the invention comprises ex vivo administration of a cocktail of epitope-bearing peptides to PBMC, or isolated DC therefrom, from the patient's blood. A pharmaceutical to facilitate harvesting of DC can be used, such as Progenipoietin™ (Monsanto, St. Louis, Mo.) or GM-CSF/IL-4. After pulsing the DC with peptides and prior to reinfusion into patients, the DC are washed to remove unbound peptides. In this embodiment, a vaccine comprises peptide-pulsed DCs which present the pulsed peptide epitopes in HLA molecules on their surfaces.

[0449] The DC can be pulsed ex vivo with a cocktail of peptides, some of which stimulate CTL responses to one or more antigens of interest, e.g., antigens from infectious agents such as HIV env, HIV pol, HIV gag, HIV vpu, HIV and/or the antigens in Tables 11-22, or otherwise described herein or know in the art. Optionally, a helper T cell (HTL) peptide such as PADRE®, can be included to facilitate the CTL response. Thus, a vaccine in accordance with the invention comprising epitopes from an infectious agent is used to treat or prevent disease mediated by these agents in patients. A vaccine can be used prior to, during, or following other therapies including, for example, antibiotic therepy, anti-viral therapy (e.g., highly active antiretroviral therapy (HAART) in the case of HIV-AIDS), antibody therapy, cancer therapy, and adjunct thereapy, whereupon the vaccine provides descreased morbidity, increased disease free survival and overall survival in recipients.

[0450] Diagnostic and Prognostic Uses

[0451] In one embodiment of the invention, HLA class I and class II binding peptides can be used as reagents to evaluate an immune response. Preferably, the following principles are utilized when selecting a variant(s) for diagnostic, prognostic and similar uses. Potential principles include having the binding affinities described earlier, and/or matching the HLA-motif/supermotif of a peptide with the HLA-type of a patient.

[0452] The evaluated immune response can be induced by any immunogen. For example, the immunogen may result in the production of antigen-specific CTLs or HTLs that recognize the peptide epitope(s) employed as the reagent. Thus, a peptide of the invention may or may not be used as the immunogen. Assay systems that can be used for such analyses include tetramer-based protocols (e.g., DimerX technology (see, e.g., Science 274:94-99 (1996) and Proc. Natl. Acad. Sci. 95:7568-73 (1998)), staining for intracellular lymphokines, interferon release assays, or ELISPOT assays.

[0453] For example, following exposure to a putative immunogen, a peptide of the invention can be used in a tetramer staining assay to assess peripheral blood mononuclear cells for the presence of any antigen-specific CTLs. The HLA-tetrameric complex is used to directly visualize antigen-specific CTLs and thereby determine the frequency of such antigen-specific CTLs in a sample of peripheral blood mononuclear cells (see, e.g., Ogg et al., Science 279:2103-2106, 1998; and Altman et al., Science 174:94-96, 1996).

[0454] A tetramer reagent comprising a peptide of the invention is generated as follows: A peptide that binds to an HLA molecule is refolded in the presence of the corresponding. HLA heavy chain and β₂-microglobulin to generate a trimolecular complex. The complex is biotinylated at the carboxyl terminal end of the HLA heavy chain, at a site that was previously engineered into the protein. Tetramer formation is then induced by adding streptavidin. When fluorescently labeled streptavidin is used, the tetrameric complex is used to stain antigen-specific cells. The labeled cells are then readily identified, e.g. by flow cytometry. Such procedures are used for diagnostic or prognostic purposes; the cells identified by the procedure can be used for therapeutic purposes.

[0455] Peptides of the invention are also used as reagents to evaluate immune recall responses. (see, e.g., Bertoni et al., J. Clin. Invest. 100:503-513, 1997 and Penna et al., J. Exp. Med. 174:1565-1570, 1991.) For example, a PBMC sample from an individual expressing a disease-associated antigen (e.g. an antigen from an infectious agent) can be analyzed for the presence of antigen-specific CTLs or HTLs using specific peptides. A blood sample containing mononuclear cells may be evaluated by cultivating the PBMCs and stimulating the cells with a peptide of the invention. After an appropriate cultivation period, the expanded cell population may be analyzed, for example, for CTL or for HTL activity.

[0456] Thus, the peptides can be used to evaluate the efficacy of a vaccine. PBMCs obtained from a patient vaccinated with an immunogen may be analyzed by methods such as those described herein. The patient is HLA typed, and peptide epitopes that are bound by the HLA molecule(s) present in that patient are selected for analysis. The immunogenicity of the vaccine is indicated by the presence of CTLs and/or HTLs directed to epitopes present in the vaccine.

[0457] The peptides of the invention may also be used to make antibodies, using techniques well known in the art (see, e.g. CURRENT PROTOCOLS IN IMMUNOLOGY, Wiley/Greene, NY; and Antibodies A Laboratory Manual Harlow, Harlow and Lane, Cold Spring Harbor Laboratory Press, 1989). Such antibodies are useful as reagents to determine the presence of disease-associated antigens. Antibodies in this category include those that recognize a peptide when bound by an HLA molecule, i.e., antibodies that bind to a peptide-MHC complex.

[0458] Administration for Therapeutic or Prophylactic Purposes

[0459] The peptides and polynucleotides of the present invention, including cells and compositions comprising them, are useful for administration to mammals, particularly humans, to treat and/or prevent infection by an infectious agent such as HIV, HBV, HCV, HPV, Plasmodium falciparum and other agents described herein or known in the art. Vaccine compositions containing the peptides of the invention are administered to a patient infected with a particular infectious agent or to an individual susceptible to, or otherwise at risk for, infection with such an agent to elicit an immune response against antigens of that agent and thus enhance the patient's own immune response capabilities. Where susceptible individuals are identified prior to infection, the composition can be targeted to them, thus minimizing the need for administration to a larger population.

[0460] In therapeutic applications, peptide and/or nucleic acid compositions are administered to a patient in an amount sufficient to elicit an effective immune response to the infectious agent antigen and to thereby cure, arrest or slow symptoms and/or complications. An amount adequate to accomplish this is defined as “therapeutically effective dose.” Amounts effective for this use will depend on, e.g., the particular composition administered, the manner of administration, the stage and severity of the disease being treated, the weight and general state of health of the patient, and the judgment of the prescribing physician.

[0461] The vaccine compositions of the invention can be used purely as prophylactic agents. Generally the dosage for an initial prophylactic immunization generally occurs in a unit dosage range where the lower value is about 1, 5, 50, 500, or 1000 μg of peptide and the higher value is about 10,000; 20,000; 30,000; or 50,000 μg of peptide. Dosage values for a human typically range from about 500 μg to about 50,000 μg of peptide per 70 kilogram patient. This is followed by boosting dosages of between about 1.0 μg to about 50,000 μg of peptide, administered at defined intervals from about four weeks to six months after the initial administration of vaccine. The immunogenicity of the vaccine may be assessed by measuring the specific activity of CTL and HTL obtained from a sample of the patient's blood.

[0462] As noted above, peptides comprising CTL and/or HTL epitopes of the invention induce immune responses when presented by HLA molecules and contacted with a CTL or HTL specific for an epitope comprised by the peptide. The manner in which the peptide is contacted with the CTL or HTL is not critical to the invention. For instance, the peptide can be contacted with the CTL or HTL either in vitro or in vivo. If the contacting occurs in vivo, peptide can be administered directly, or in other forms/vehicles, e.g. DNA vectors encoding one or more peptides, viral vectors encoding the peptide(s), liposomes, antigen presenting cells such as dendritic cells, and the like.

[0463] Accordingly, for pharmaceutical compositions of the invention in the form of peptides or polypeptides, the peptides or polypeptides can be administered directly. Alternatively, the peptide/polypeptides can be administered indirectly presented on APCs, or as DNA encoding them. Furthermore, the peptides or DNA encoding them can be administered individually or as fusions of one or more peptide sequences.

[0464] For therapeutic use, administration should generally begin at the first diagnosis of infectious agent-related disease. This is followed by boosting doses at least until symptoms are substantially abated and for a period thereafter. In chronic disease states, loading doses followed by boosting doses may be required.

[0465] The dosage for an initial therapeutic immunization generally occurs in a unit dosage range where the lower value is about 1, 5, 50, 500, or 1,000 μg of peptide and the higher value is about 10,000; 20,000; 30,000; or 50,000 μg of peptide. Dosage values for a human typically range from about 500 μg to about 50,000 μg of peptide per 70 kilogram patient. Boosting dosages of between about 1.0 μg to about 50,000 μg of peptide, administered pursuant to a boosting regimen over weeks to months, can be administered depending upon the patient's response and condition. Patient response can be determined by measuring the specific activity of CTL and HTL obtained from the patient's blood.

[0466] In certain embodiments, peptides and compositions of the present invention are used in serious disease states. In such cases, as a result of the minimal amounts of extraneous substances and the relative nontoxic nature of the peptides, it is possible and may be desirable to administer substantial excesses of these peptide compositions relative to these stated dosage amounts.

[0467] For treatment of chronic disease, a representative dose is in the range disclosed above, namely where the lower value is about 1, 5, 50, 500, or 1,000 μg of peptide and the higher value is about −10,000; 20,000; 30,000; or 50,000 μg of peptide, preferably from about 500 μg to about 50,000 μg of peptide per 70 kilogram patient. Initial doses followed by boosting doses at established intervals, e.g., from four weeks to six months, may be required, possibly for a prolonged period of time to effectively immunize an individual. In the case of chronic disease, administration should continue until at least clinical symptoms or laboratory tests indicate that the disease has been eliminated or substantially abated, and for a follow-up period thereafter. The dosages, routes of administration, and dose schedules are adjusted in accordance with methodologies known in the art.

[0468] The pharmaceutical compositions for therapeutic treatment are intended for parenteral, topical, oral, intrathecal, or local administration. Preferably, the pharmaceutical compositions are administered parentally, e.g., intravenously, subcutaneously, intradermally, or intramuscularly.

[0469] Thus, in a preferred embodiment the invention provides compositions for parenteral administration which comprise a solution of the immunogenic peptides dissolved or suspended in an acceptable carrier, preferably an aqueous carrier. A variety of aqueous carriers may be used, e.g., water, buffered water, 0.8% saline, 0.3% glycine, hyaluronic acid and the like. These compositions may be sterilized by conventional, well known sterilization techniques, or may be sterile filtered. The resulting aqueous solutions may be packaged for use as is, or lyophilized, the lyophilized preparation being combined with a sterile solution prior to administration. The compositions may contain pharmaceutically acceptable auxiliary substances or pharmaceutical excipients as may be required to approximate physiological conditions, such as pH-adjusting and buffering agents, tonicity adjusting agents, wetting agents, preservatives, and the like, for example, sodium acetate, sodium lactate, sodium chloride, potassium chloride, calcium chloride, sorbitan monolaurate, triethanolamine oleate, etc.

[0470] The concentration of peptides of the invention in the pharmaceutical formulations can vary widely, i.e., from less than about 0.1%, usually at or at least about 2% to as much as 20% to 50% or more by weight, and will be selected primarily by fluid volumes, viscosities, etc., in accordance with the particular mode of administration selected.

[0471] A human unit dose form of the peptide composition is typically included in a pharmaceutical composition that also comprises a human unit dose of an acceptable carrier, preferably an aqueous carrier, and is administered in a volume of fluid that is known by those of skill in the art to be used for administration of such compositions to humans (see, e.g., Reminigton's Pharmaceutical Sciences, 17^{th} Edition, A. Gennaro, Editor, Mack Publishing Co., Easton, Pa., 1985).

[0472] The peptides of the invention can also be administered via liposomes, which serve to target the peptides to a particular tissue, such as lymphoid tissue, or to target selectively to infected cells, as well as to increase the half-life of the peptide composition. Liposomes include emulsions, foams, micelles, insoluble monolayers, liquid crystals, phospholipid dispersions, lamellar layers and the like. In these preparations, the peptide to be delivered is incorporated as part of a liposome, alone or in conjunction with a molecule which binds to a receptor prevalent among lymphoid cells (such as monoclonal antibodies which bind to the CD45 antigen) or with other therapeutic or immunogenic compositions. Thus, liposomes either filled or decorated with a desired peptide of the invention can be directed to the site of lymphoid cells, where the liposomes then deliver the peptide compositions. Liposomes for use in accordance with the invention are formed from standard vesicle-forming lipids, which generally include neutral and negatively charged phospholipids and a sterol, such as cholesterol. The selection of lipids is generally guided by consideration of, e.g., liposome size, acid lability and stability of the liposomes in the blood stream. A variety of methods are available for preparing liposomes, as described in, e.g., Szoka, et al., Ann. Rev. Biophys. Bioeng. 9:467 (1980), and U.S. Pat. Nos. 4,235,871, 4,501,728, 4,837,028, and 5,019,369.

[0473] For targeting compositions of the invention to cells of the immune system, a ligand can be incorporated into the liposome, e.g., antibodies or fragments thereof specific for cell surface determinants of the desired immune system cells. A liposome suspension containing a peptide may be administered intravenously, locally, topically, etc. in a dose which varies according to, inter alia, the manner of administration, the peptide being delivered, and the stage of the disease being treated.

[0474] For solid compositions, conventional nontoxic solid carriers may be used which include, for example, pharmaceutical grades of mannitol, lactose, starch, magnesium stearate, sodium saccharin, talcum, cellulose, glucose, sucrose, magnesium carbonate, and the like. For oral administration, a pharmaceutically acceptable nontoxic composition is formed by incorporating any of the normally employed excipients, such as those carriers previously listed, and generally 10-95% of active ingredient, that is, one or more peptides of the invention, often at a concentration of 25%-75%.

[0475] For aerosol administration, the immunogenic peptides are preferably supplied in finely divided form, along with a surfactant and propellant. Typical percentages of peptides are 0.01%-20% by weight, often 1%-10%. The surfactant must, of course, be pharmaceutically acceptable, and preferably soluble in the propellant. Representative of such agents are the esters or partial esters of fatty acids containing from 6 to 22 carbon atoms, such as caproic, octanoic, lauric, palmitic, stearic, linoleic, linolenic, olesteric and oleic acids with an aliphatic polyhydric alcohol or its cyclic anhydride. Mixed esters, such as mixed or natural glycerides may be employed. The surfactant may constitute 0.1%-20% by weight of the composition, preferably 0.25-5%. The balance of the composition is ordinarily propellant, although an atomizer may be used in which no propellant is necessary and other percentages are adjusted accordingly. A carrier can also be included, e.g., lecithin for intranasal delivery.

[0476] Antigenic peptides of the invention have been used to elicit a CTL and/or HTL response ex vivo, as well. The resulting CTLs or HTLs can be used to treat chronic infections, or tumors in patients that do not respond to other conventional forms of therapy, or who do not respond to a therapeutic peptide or nucleic acid vaccine in accordance with the invention. Ex vivo CTL or HTL responses to a particular antigen (infectious or tumor-associated) are induced by incubating in tissue culture the patient's, or genetically compatible, CTL or HTL precursor cells together with a source of antigen-presenting cells (APC), such as dendritic cells, and the appropriate immunogenic peptide. After an appropriate incubation time (typically about 7-28 days), in which the precursor cells are activated and expanded into effector cells, the cells are infused back into the patient, where they will destroy (CTL) or facilitate destruction (HTL) of their specific target cell (an infected cell or a tumor cell).

[0477] Kits

[0478] The peptide and nucleic acid compositions of this invention can be provided in kit form together with instructions for vaccine administration. Typically the kit would include desired composition(s) of the invention in a container, preferably in unit dosage form and instructions for administration. For example, a kit would include an APC, such as a dendritic cell, previously exposed to and now presenting peptides of the invention in a container, preferably in unit dosage form together with instructions for administration. An alternative kit would include a minigene construct with desired nucleic acids of the invention in a container, preferably in unit dosage form together with instructions for administration. Lymphokines such as IL-2 or IL-12 may also be included in the kit. Other kit components that may also be desirable include, for example, a sterile syringe, booster dosages, and other desired excipients.

[0479] The invention will be described in greater detail by way of specific examples. The following examples are offered for illustrative purposes, and are not intended to limit the invention in any manner. Those of skill in the art will readily recognize a variety of non-critical parameters that can be changed or modified to yield alternative embodiments in accordance with the invention.

### EXAMPLES

### Example 1

### HLA Class I and Class II Binding Assays

[0480] The following example of peptide binding to HLA molecules demonstrates quantification of binding affinities of HLA class I and class II peptides. Binding assays can be performed with peptides that are either motif-bearing or not motif-bearing.

[0481] Cell lysates were prepared and HLA molecules purified in accordance with disclosed protocols (Sidney et al., Current Protocols in Immunology 18.3.1 (1998); Sidney, et al., J. Immunol. 154:247 (1995); Sette, et al., Mol. Immunol. 31:813 (1994)). The cell lines used as sources of HLA molecules and the antibodies used for the extraction of the HLA molecules from the cell lysates are also described in these publications and are well known in the art.

[0482] Epstein-Barr virus (EBV)-transformed homozygous cell lines, fibroblasts, CIR, or 721.221-transfectants were used as sources of HLA class I molecules. These cells were cultured in RPMI 1640 medium supplemented with 2 mM L-glutamine (GIBCO, Grand Island, N.Y.), 50 μM 2-ME, 100 μg/ml of streptomycin, 100 U/ml of penicillin (Irvine Scientific) and 10% heat-inactivated FCS (Irvine Scientific, Santa Ana, Calif.).

[0483] Cell lysates were prepared as follows. Briefly, cells were lysed at a concentration of 10⁸ cells/ml in 50 mM Tris-HCl, pH 8.5, containing 1% Nonidet P-40 (Fluka Biochemika, Buchs, Switzerland), 150 mM NaCl, 5 mM EDTA, and 2 mM PMSF. Lysates were cleared of debris and nuclei by centrifugation at 15,000×g for 30 min.

[0484] HLA molecules were purified from lysates by affinity chromatography. Lysates were passed twice through two pre-columns of inactivated Sepharose CL4-B and protein A-Sepharose. Next, the lysate was passed over a column of Sepharose CL-4B beads coupled to an appropriate antibody. The anti-HLA column was then washed with 10-column volumes of 10 mM Tris-HCL, pH 8.0, in 1% NP-40, PBS, 2-column volumes of PBS, and 2-column volumes of PBS containing 0.4% n-octylglucoside. Finally, MHC molecules were eluted with 50 mM diethylamine in 0.15M NaCl containing 0.4% n-octylglucoside, pH 11.5. A 1/25 volume of 2.0M Tris, pH 6.8, was added to the eluate to reduce the pH to ˜8.0. Eluates were then concentrated by centrifugation in Centriprep 30 concentrators at 2000 rpm (Amicon, Beverly, Mass.). Protein content was evaluated by a BCA protein assay (Pierce Chemical Co., Rockford, Ill.) and confirmed by SDS-PAGE.

[0485] A detailed description of the protocol utilized to measure the binding of peptides to Class I and Class II MHC has been published (Sette et al., Mol. Immunol. 31:813, 1994; Sidney et al., in Current Protocols in Immunology, Margulies, Ed., John Wiley & Sons, New York, Section 18.3, 1998). Briefly, purified MHC molecules (5 to 500 nM) were incubated with various unlabeled peptide inhibitors and 1-10 nM ¹²⁵I-radiolabeled probe peptides for 48 h in PBS containing 0.05% Nonidet P-40 (NP40) (or 20% w/v digitonin for H-2 IA assays) in the presence of a protease inhibitor cocktail. The final concentrations of protease inhibitors (each from CalBioChem, La Jolla, Calif.) were 1 mM PMSF, 1.3 nM 1.10 phenanthroline, 73 μM pepstatin A, 8 mM EDTA, 6 mM N-ethylmaleimide (for Class II assays), and 200 μM N alpha-p-tosyl-L-lysine chloromethyl ketone (TLCK). All assays were performed at pH 7.0 with the exception of DRB1*0301, which was performed at pH 4.5, and DRB1*1601 (DR2w21β₁) and DRB4*0101 (DRw53), which were performed at pH 5.0. pH was adjusted as described elsewhere (see Sidney et al., in Current Protocols in Immunology, Margulies, Ed., John Wiley & Sons, New York, Section 18.3, 1998).

[0486] Following incubation, MHC-peptide complexes were separated from free peptide by gel filtration on 7.8 mm×15 cm TSK200 columns (TosoHaas 16215, Montgomeryville, Pa.), eluted at 1.2 mls/min with PBS pH 6.5 containing 0.5% NP40 and 0.1% NaN₃. Because the large size of the radiolabeled peptide used for the DRB1*1501 (DR2w2β₁) assay makes separation of bound from unbound peaks more difficult under these conditions, all DRB1*1501 (DR2w2β₁) assays were performed using a 7.8 mm×30 cm TSK2000 column eluted at 0.6 mls/min. The eluate from the TSK columns was passed through a Beckman 170 radioisotope detector, and radioactivity was plotted and integrated using a Hewlett-Packard 3396A integrator, and the fraction of peptide bound was determined.

[0487] Radiolabeled peptides were iodinated using the chloramine-T method. Representative radiolabeled probe peptides utilized in each assay, and its assay specific IC₅₀ nM, are known in the art. Typically, in preliminary experiments, each MHC preparation was titered in the presence of fixed amounts of radiolabeled peptides to determine the concentration of HLA molecules necessary to bind 10-20% of the total radioactivity. All subsequent inhibition and direct binding assays were performed using these HLA concentrations.

[0488] Since under these conditions [label]<[HLA] and IC₅₀≧[HLA], the measured IC₅₀ values are reasonable approximations of the true K_{D} values. Peptide inhibitors are typically tested at concentrations ranging from 120 μg/ml to 1.2 ng/ml, and are tested in two to four completely independent experiments. To allow comparison of the data obtained in different experiments, a relative binding figure is calculated for each peptide by dividing the IC₅₀ of a positive control for inhibition by the IC₅₀ for each tested peptide (typically unlabeled versions of the radiolabeled probe peptide). For inter-experiment comparisons, relative binding values are compiled. These values can subsequently be converted back into IC₅₀ nM values by dividing the IC₅₀ nM of the positive controls for inhibition by the relative binding of the peptide of interest. This method of data compilation has proven to be the most accurate and consistent for comparing peptides that have been tested on different days, or with different lots of purified MHC.

[0489] Because the antibody used for HLA-DR purification (LB3.1) is α-chain specific, β₁ molecules are not separated from β₃ (and/or β₄ and β₅) molecules. The β₁ specificity of the binding assay is obvious in the cases of DRB1*0101 (DR1), DRB1*0802 (DR8w2), and DRB1*0803 (DR8w3), where no β₃ is expressed. It has also been demonstrated for DRB1*0301 (DR3) and DRB3*0101 (DR52a), DRB1*0401 (DR4w4), DRB1*0404 (DR4w14), DRB1*0405 (DR4w15), DRB1*1101 (DR5), DRB1*1201 (DRw12), DRB1*1302 (DR6w19) and DRB1*0701 (DR7). The problem of β chain specificity for DRB1*1501 (DR2w2β₁), DRB5*0101 (DP2w2β₂), DRB1*1601 (DR2w21β₁), DRB5*0201 (DR51Dw21), and DRB4*0101 (DRw53) assays is circumvented by the use of fibroblasts. Development and validation of assays with regard to DRβ molecule specificity have been described previously (see, e.g., Southwood et al., J. Immunol. 160:3363-3373, 1998).

[0490] Binding assays as outlined above may be used to analyze supermotif and/or motif-bearing epitopes.

### Example 2

### Recognition of Variant Peptides by CTL Derived from DNA Immunization

[0491] Variants corresponding to five HLA-A2 and -A3 restricted epitopes from 167 HIV varianst were identified and synthesized. These represented all the complete sequences in the Los Alamos database at the time (116 strains), as well as 51 complete clade C sequences from Botswana, and included 22 subtype B and 62 subtype C sequences. These peptides were then characterized with regard to MHC binding, variant distribution, and immunogenicity. To measure immunogenicity, HLA-A2/K^{b} or HLA-A11/K^{b} transgenic mice were immunized with the epitopes encoded in a DNA based format ( ). Eleven days after immunization, splenocytes were restimulated with either the epitope corresponding to the epitope encoded by the DNA (parent) or each of the variant peptides. After 6 days in culture, IFN-γ secretion was measured in response to the peptide used to stimulate each culture.

[0492] The data for these epitopes are shown in FIG. 1. The HLA-A2-restricted epitope corresponding to the Env 134 epitope (KLTPLCVTL; FIG. 1A) used as the immunogen was the form observed most often (134/167). All single anchor variants were recognized to approximately the same extent as the parent peptide. Many of the single non-anchor variants (9/13) were also recognized within 10-fold of the parent peptide. Conservative substitutions (R and Q for K; see Table 4) at position 1 (P1) were tolerated, while the non-conservative substitution (E for K; see Table 4) lowered binding and eliminated recognition. Three P4 variants were observed. Two of these (F or S for P) were recognized within 10-fold of the recognition of the parent peptide, while one substitution (Q for P) completely eliminated recognition. The binding for these peptides was not significantly different from the parent peptide, indicating that this residue may be involved in TCR recognition. Both the conservative (F for L) and non-conservative (R for L) substitutions seen at P5 completely abrogated recognition, indicating that this residue is important in TCR recognition. Finally, one substitution at P8 (I for V), and four substitutions at P9 show little effect on recognition. None of the variants with multiple substitutions were recognized, although this may be due to the poor binding of these peptides.

[0493] The Gag 386 sequence utilized as the immunogen was the second most common form (VLAEAMSQV), present in 54 strains (FIG. 1B). The most prevalent variant, differing by a single tolerated C terminal anchor residue (V to A; 67 strains), was recognized equally to the parent epitope by CTL raised against the parent, as were the remaining single-anchor variants. Single substitutions were also tolerated at the non-anchor positions, P1 (I for V) and P8 (R, K, or H for Q). Only the P7 variant (G for S), probably a TCR contact residue, was not recognized.

[0494] Many of the multiple variants for Gag 386 were also recognized by CTL raised against the parent peptide. All the variants with multiple changes combined a change of V to A or T at the C terminus with 1-3 additional substitutions. Two variants with N terminal changes (V to A or I) were observed. The non-conservative A substitution was not recognized, while the conservative I substitution was. A double variant with a conservative substitution at P3 (A to G) was not recognized, implicating P3 in TCR recognition. Double variants with conservative changes at position 8 (Q to R, K, or H) were not well recognized, although the variants with single changes at the same positions were recognized. The variant combining a non-conservative A residue at position 8 with A at the C terminus was recognized as well as the parent. Equally surprising was the observation that all the variants with 3 or 4 substitutions were recognized within 10-fold of the parent peptide.

[0495] The parent form of the HLA-A2-restricted epitope, Vpr 62 (RILQQLLFI; FIG. 1C) was the most common form observed (86/167). Seven well-tolerated single anchor substitutions, 4 P2 and 3 C terminal, were also observed, accounting for most of the remaining variants (47/167). Single substitutions were, in general, also well tolerated. The single exception was the non-conservative substitution (P for L) at P6, while an M for L substitution at the same site was well tolerated. Binding was not affected for either variant, indicating that the reduction in activity is due to a change in a contact residue. Most variants with multiple changes also showed recognition to approximately the same extent as the parent. Several variants however did show reduced recognition. The variant with changes at both anchors (I to T at P2 and I to T at P9) had reduced binding (IC₅₀ of 9700), and recognition of the peptide was reduced, although not lost completely. Two variants with Q to H changes at P5, in combination with anchor residue changes (I to M at P2 and I to A at P9), exhibited greatly reduced recognition although binding was not affected. Other changes at P5 (Q to R or L at P5) reduced recognition only slightly.

[0496] The HLA-A3/11-restricted epitope, Pol 98 (FIG. 1D), represented the most diverse epitope in terms of the number of variant epitopes identified. The peptide encoded in the DNA was represented in only 18 out of 167 strains. Approximately a third of the peptides identified at that position (49 out of 167) did not have recognizable A3/A11 motifs. The most common variant (30 strains) differed from the parent peptide at 3 residues (VSIKVGGQIK), but was recognized within 10-fold of the parent peptide. Two variants with conservative changes at anchor residues were both recognized, although the T to A substitution at P2 resulted in a 10-fold reduction in recognition of the variant peptide. All peptides with single changes in non-anchor positions were also recognized, although the P5 variant (G to E) exhibited a decrease in recognition. As the binding was not affected, this probably indicates involvement in T cell recognition.

[0497] Peptides with two changes showed mixed results. In general, peptides with a V substitution at position 3, in combination with another substitution were recognized to the same extent as the corresponding single substitution, indicating the V substitution was tolerated well and is not a TCR contact residue. Combinations including the P2 anchor residue (T to A or N) were not recognized, although the binding of these peptides was also low. Variants with 3 substitutions were generally not recognized well. Two exceptions with very conservative substitutions were noted (FIG. 1D). CTL were unable to recognize peptides with four or more substitutions.

[0498] The HLA-A3/11-restricted Env 47 epitope (FIG. 1E; VTVYYGVPVWK) was highly conserved, with only 9 variants identified. The most common form observed was the parent peptide (99 strains), while the second most common form, a single anchor substitution observed in 40 strains, was recognized to the same extent as the parent. All the variants were recognized within 10-fold of the parent epitope.

[0499] Taken together, these data show trends towards promiscuous recognition of variant peptides by CTL generated from immunization with a single peptide. In general, changes that disrupted binding also decreased recognition. Recognition was also affected by the position of the change, with potential TCR contact residues (P3-7) exerting a greater effect on recognition than other residues. In general, conservative residue changes were more widely tolerated than were non-conservative changes. Recognition was also dependent on the number of changes, with progressively lower recognition with a greater number of changes.

[0500] Recognition after multiple restimulations The observed recognition of variant peptides by CTL raised against the parent peptide might be due to either promiscuous recognition at the level of a single TCR or simply a mixture of TCRs against the immunizing peptide which are each able to recognize subtly different peptides. To distinguish between these two possibilities, Env 134- or Gag 386-specific T cell lines were generated by stimulating five times with the immunizing peptide, and then tested for recognition of a partial panel of variant peptides. These T cell lines were also characterized for Vβ TCR usage against a panel of antibodies predicted to react with the TCR of the mouse strains utilized for these experiments.

[0501] The data for these peptide-specific lines are shown in Table 5. Because the SU is a measure of the number of cells needed to secrete a defined amount of IFN-γ, a higher SU value would correspond to an enrichment of IFN-γ, producing cells. A comparison of one and five peptide stimulations indeed shows an enrichment of CTL specific for the immunizing peptide for both of the peptide lines generated (Table 5A and 5B, first line). The Gag 386 line (Table 5A) also demonstrated increased recognition of all the variant peptides measured except one peptide (ILAEAMSKA) that was never recognized. The Env 134 line also demonstrated enrichment for CTL able to recognize several of the variant peptides (Table 5B).

[0502] To further characterize these lines, we examined them for Vβ usage, utilizing a panel of commercially available antibodies available for mouse TCR Vβ 2-14. To determine background levels for the various TCR Vβ molecules, primary splenocytes from mice that had been immunized with EP HIV-1090 were also examined. The results for the Gag 386 line are shown in FIG. 2A. After a single stimulation with the parent peptide, the Gag 386 line showed a mixture of TCR positive populations, including Vβ 3, 5, and 14. After 5 stimulations, those populations had been reduced to background levels, and approximately 50% of the CD8+ cells expressed the Vβ 6 TCR. The Env 134 line showed a similar pattern of multiple TCR positive populations after a single round of stimulation with reduction to background levels after 5 stimulations (data not shown). However, no single Vβ usage significantly above background could be demonstrated, probably due to lack of the relevant TCR Vβ antibody.

[0503] Both lines were also characterized with regard to the affinity of certain of the variant peptides by titrating the variant peptides examined above (Table 5A and 5B). The data for both the Gag 386 and Env 134 lines are shown in FIG. 2B. For the Gag 386 line, the parent peptide along with two single anchor variants (VLAEAMSQI and VLAEAMSQA) showed the highest affinity. Four other peptides demonstrated lower affinity, but still produced IFN-γ in response to higher peptide concentrations. A single peptide (ILAEAMSKA) was not recognized.

[0504] As expected, the parent peptide, which was used to generate the Env 134 line, showed the highest affinity for the TCR. The other 2 variant peptides, KITPLCVTL and QLTPLCVTL, also demonstrated higher affinity, but reduced from the parent peptide by approximately 10-fold and 100-fold, respectively. It was notable that only at the highest peptide concentration examined (1 μg/ml) was any IFN-γ secretion detected for five of the peptides (QITPLCVTL, ELTPLCVTL, KLTPFCVTL, KLTPLCVIL, and KLTPLCVPL). These five peptides showed little or no enrichment of CTL able to recognize them, and exhibited the lowest activity as measured by SU after five restimulations (see Table 5B).

[0505] In summary, these cell lines seem to consist of a narrow, possibly single, TCR population. This TCR population recognizes the parent peptide with the highest affinity, but is also able to recognize a number of other variant peptides with equal or lesser affinity.

[0506] Recognition of Variant Peptides by CTL Derived from an HIV Infected Patient.

[0507] To determine if the same immunological conservation was observed in natural infections, we identified an HIV-infected individual expressing the HLA-A3 allele. The HIV strain and subtype with which this patient was infected is unknown. We had previously shown that T cells from this individual responded to the HLA-A3 restricted epitopes Pol 98 and Env 47. PBL from this patient were examined in an ELISPOT assay to determine if they also showed the capacity for broad cross-reactivity. The data are shown in FIG. 3. Although the actual peptide represented in the HIV strain with which this individual is infected is unknown, we observed recognition of a large number of the variant peptides for both Pol 98 (FIG. 3A) and Env 47 (FIG. 3B). The recognition patterns were remarkably similar for the mouse and patient data (compare FIG. 1 and FIG. 3), although the mouse expressed a transgene for HLA-A11 and the patient was HLA-A3.

[0508] Prediction of Immunological Conservation. We had observed that the variant peptides that were recognized by CTL raised against the parent epitope had amino acid substitutions that followed previous observations. For example, the anchor residue changes that were tolerated in the variant peptides were also described as anchors that to define the respective HLA supertypes ( ). In general, conservative substitutions were tolerated at non-anchor residues, while non-conservative substitutions were less well tolerated. These followed closely the prediction model used to identify heteroclitic analogs (Tangri et al).

[0509] Based on these observations, we designed a computer program to predict immunological conservation. For anchor positions, this program utilized the conserved anchor residues described for the A2, A3, and B7 supertypes. For non-anchor positions only conservative substitutions, as defined in Tangri et. al. ( ), were allowed. All substitutions at non-anchor positions were analyzed independently and all conservative substitutions were allowed regardless of the number of substitutions. Finally, the position of the substitution was not factored into analysis. Each variant was compared with the parent epitope, and its ability to be recognized was predicted as either positive or negative.

[0510] The first sets of epitopes to be evaluated by this program were the five HIV epitopes and variants previously described. For the Env 134 epitope, the program predicted that 13 of the variant peptides should be immunologically conserved, while 6 should not be recognized. Comparison of the observed immunological data with the prediction showed that the program predicted correctly for 14 of the peptides and incorrectly for 5. Of the incorrect predictions, in two cases the program predicted negative results for peptides that were recognized, while in 3 cases the program predicted positive results for peptides that were not recognized. A similar analysis was performed for all five peptides. Of 101 total variant peptides, 68 were correctly identified (67%). The discordant data were fairly evenly split between peptides incorrectly predicted negative (15) and those incorrectly predicted positive (18).

[0511] As noted previously, the more substitutions present in a variant peptide, the lower the likelihood of its immunogenicity. Since the prediction program treated all substitutions independently, and did not take into account the number of substitutions, we hypothesized that prediction of single substitutions would be more accurate. Indeed, the immunogenicity of 38 of 47 single substitution variants (80%) was correctly predicted.

[0512] With the limitations of the program in mind, it is useful to predict the recognition of the variants for a package of HLA-A2, -A3, and -B7 supertype epitopes. These epitopes had been identified as being well conserved in Clade B variants. When comparing the conservation of this group of epitopes based on sequence identity versus immunological conservation, it is interesting to note that the predicted recognition gains taking into account immunological conservation are significant (Table 6).

[0513] This particular group of 21 epitopes was selected based on their identity conservation in Clade B HIV sequences, with conservation across HIV clades as a secondary consideration. Because of this criteria, the form of epitope chosen as the parent peptide was not the most common variant (e.g. Gag 386, Gag 271, Pol 98). In some cases (e.g., see Gag 386 data), the “parent” epitope and the most common variant were recognized to the same extent. However, in some cases the selection of epitope to include as the “parent” epitope was predicted to make a difference in the immunological conservation. An example of this was the Gag 271 epitope (FIG. 4). The variant most commonly seen in clade B sequences was the MTNNPPIPV form, while the most common form of the epitope was MTSNPPIPV. Not all amino acids are considered equal to each other in their ability to substitute (Tangri). For example, asparagine (N) is considered a conservative substitution for serine (S), while the opposite substitution in only considered semi-conserved. When the program calculated immunological conservation using the MTNNPPIPV peptide as the parent peptide, only two variants were predicted to be immunogenic. However, when the immunological conservation was predicted using the MTSNPPIPV peptide, most of the variants were predicted to be recognized (FIG. 4). This prediction was tested using HLA-A2 transgenic mice. The results show that if the MTSNPPIPV form of the peptide was utilized in vaccines, approximately 152 of 167 variants would be recognized, while if the MTNNPPIPV form of the epitope was utilized, only 39 of 167 variants would be recognized. This has important implications in epitope selection for vaccine development, and epitope performance can be predicted.

### Example 3

### A Padre® Molecule as a Helper Epitope for Enhancement of CTL Induction

[0514] There is increasing evidence that HTL activity is critical for the induction of long lasting CTL responses (Livingston et al. J. Immunol 162:3088-3095 (1999); Walter et al., New Engl. J. Med. 333:1038-1044 (1995); Hu et al., J. Exp. Med. 177:1681-1690 (1993)). Therefore, one or more peptides that bind to HLA class II molecules and stimulate HTLs can be used in accordance with the invention. Accordingly, a preferred embodiment of a vaccine includes a molecule from the PADRE® family of universal T helper cell epitopes (HTL) that target most DR molecules in a manner designed to stimulate helper T cells. For instance, a pan-DR-binding epitope peptide having the formula: aKXVAAZTLKAAa, where “X” is either cyclohexylalanine, phenylalanine, or tyrosine; “Z” is either tryptophan, tyrosine, histidine or asparagine; and “a” is either D-alanine or L-alanine (SEQ ID NO:29), has been found to bind to most HLA-DR alleles, and to stimulate the response of T helper lymphocytes from most individuals, regardless of their HLA type.

[0515] A particularly preferred PADRE® molecule is a synthetic peptide, aKXVAAWTLKAAa (a=D-alanine, X=cyclohexylalanine), containing non-natural amino acids, specifically engineered to maximize both HLA-DR binding capacity and induction of T cell immune responses.

[0516] Alternative preferred PADRE® molecules are the peptides, aKFVAAWTLKAAa, aKYVAAWTLKAAa, aKFVAAYTLKAAa, aKXVAAYTLKAAa, aKYVAAYTLKAAa, aKFVAAHTLKAAa, aKXVAAHTLKAAa, aKYVAAHTLKAAa, aKFVAANTLKAAa, aKXVAANTLKAAa, aKYVAANTLKAAa, AKXVAAWTLKAAA (SEQ ID NO:30), AKFVAAWTLKAAA (SEQ ID NO:31), AKYVAAWTLKAAA (SEQ ID NO:32), AKFVAAYTLKAAA (SEQ ID NO:33), AKXVAAYTLKAAA (SEQ ID NO:34), AKYVAAYTLKAAA (SEQ ID NO:35), AKFVAAHTLKAAA (SEQ ID NO:36), AKXVAAHTLKAAA (SEQ ID NO:37), AKYVAAHTLKAAA (SEQ ID NO:38), AKFVAANTLKAAA (SEQ ID NO:39), AKXVAANTLKAAA (SEQ ID NO:40), AKYVAANTLKAAA (SEQ ID NO:41) (a=D-alanine, X=cyclohexylalanine).

[0517] In a preferred embodiment, the PADRE® peptide is amidated. For example, a particularly preferred amidated embodiment of a PADRE® molecule is conventionally written aKXVAAWTLKAAa-NH₂.

[0518] Competitive inhibition assays with purified HLA-DR molecules demonstrated that the PADRE® molecule aKXVAAWTLKAAa-NH₂ binds with high or intermediate affinity (IC₅₀≦1,000 nM) to 15 out of 16 of the most prevalent HLA-DR molecules ((Kawashima et al., Human Immunology 59:1-14 (1998); Alexander et al., Immunity 1:751-761 (1994)). A comparison of the DR binding capacity of PADRE® and tetanus toxoid (TT) peptide 830-843, a “universal” epitope has been published (Panina-Bordignon et al, Eur. J. Immunology 19:2237-2242 (1989)). The TT 830-843 peptide bound to only seven of 16 DR molecules tested, while PADRE® bound 15 of 16. At least 1 of the 15 DR molecules that bind PADRE® is predicted to be present in >95% of all humans. Therefore, this PADRE® molecule is anticipated to induce an HTL response in virtually all patients, despite the extensive polymorphism of HLA-DR molecules in the human population.

[0519] PADRE® has been specifically engineered for optimal immunogenicity for human T cells. Representative data from in vitro primary immunizations of normal human T cells with TT 830-843 antigen and the PADRE® molecule aKXVAAWTLKAAa-NH₂ are shown in FIG. 1. Peripheral blood mononuclear cells (PBMC) from three normal donors were stimulated with the peptides in vitro. Following the third round of stimulation, it was observed that PADRE® generated significant primary T cell responses for all three donors as measured in a standard T cell proliferation assay. With the PADRE® peptide, the 10,000 cpm proliferation level was generally reached with 10 to 100 ng/ml of antigen. In contrast, TT 830-843 antigen generated responses for only 2 out of 3 of the individuals tested. Responses approaching the 10,000 cpm range were reached with about 10,000 ng/ml of antigen. In this respect, it was noted that PADRE® was, on a molar basis, about 100-fold more potent than TT 830-843 antigen for activation of T cell responses.

[0520] Early data from a phase I/II investigator-sponsored trial, conducted at the University of Leiden (C. J. M. Melief), support the principle that the PADRE® molecule aKXVAAWTLKAAa, possibly the amidated aKXVAAWTLKAAa —NH₂, is highly immunogenic in humans (Ressing et al., J. Immunother. 23(2):255-66 (2000)). In this trial, a PADRE® molecule was co-emulsified with various human papilloma virus (HPV)-derived CTL epitopes and was injected into patients with recurrent or residual cervical carcinoma. However, because of the late stage of carcinoma with the study patients, it was expected that these patients were immunocompromised. The patients' immuno compromised status was demonstrated by their low frequency of influenza virus-specific CTL, reduced levels of CD3 expression, and low incidence of proliferative recall responses after in vitro stimulation with conventional antigens. Thus, no efficacy was anticipated in the University of Leiden trial, rather the goal of that trial was essentially to evaluate safety. Safety was, in fact, demonstrated. In addition to a favorable safety profile, PADRE® T cell reactivity was detected in four of 12 patients (FIG. 2) in spite of the reduced immune competence of these patients.

[0521] Thus, the PADRE® peptide component(s) of the vaccine bind with broad specificity to multiple allelic forms of HLA-DR molecules. Moreover, PADRE® peptide component(s) bind with high affinity (IC₅₀≦1000 nM), i.e., at a level of affinity correlated with being immunogenic for HLA Class II restricted T cells. The in vivo administration of PADRE® peptide(s) stimulates the proliferation of HTL in normal humans as well as patient populations.

[0522] One or more PADRE® peptide(s) may be included in a composition, e.g., a vaccine, comprising one or more peptides, either as an individual peptide(s), fused to one or more variant peptides, or both.

### Example 4

### CTL Recognition of Endogenous Processed Antigens after Priming

[0523] This example determines that CTL induced by native or analoged peptide epitopes recognize endogenously synthesized, i.e., native antigens.

[0524] Effector cells isolated from transgenic mice that are immunized with peptide epitopes are re-stimulated in vitro using peptide-coated stimulator cells. Six days later, effector cells are assayed for cytotoxicity and the cell lines that contain peptide-specific cytotoxic activity are further re-stimulated. An additional six days later, these cell lines are tested for cytotoxic activity on ⁵¹Cr labeled Jurkat-A2.1/K^{b} target cells in the absence or presence of peptide, and also tested on ⁵¹Cr labeled target cells bearing the endogenously synthesized antigen, i.e. cells that are stably transfected with HIV expression vectors.

[0525] The result will demonstrate that CTL lines obtained from animals primed with peptide epitope recognize endogenously synthesized HIV antigen. The choice of transgenic mouse model to be used for such an analysis depends upon the epitope(s) that is being evaluated. In addition to HLA-A*0201/K^{b} transgenic mice, several other transgenic mouse models including mice with human A11, which may also be used to evaluate A3 epitopes, and B7 alleles have been characterized and others (e.g., transgenic mice for HLA-A1 and A24) are being developed. HLA-DR1 and HLA-DR3 mouse models have also been developed, which may be used to evaluate HTL epitopes.

### Example 5

### Activity of CTL-HTL Conjugated Epitopes in Transgenic Mice

[0526] This example illustrates the induction of CTLs and HTLs in transgenic mice by use of a HIV CTL/HTL peptide conjugate whereby the vaccine composition comprises peptides administered to an HIV-infected patient or an individual at risk for HIV. The peptide composition can comprise multiple CTL and/or HTL epitopes. This analysis demonstrates enhanced immunogenicity that can be achieved by inclusion of one or more HTL epitopes in a vaccine composition. Such a peptide composition can comprise an HTL epitope conjugated to a preferred CTL epitope containing, for example, at least one CTL epitope, or an analog of that epitope. The peptides may be lipidated, if desired.

[0527] Immunization procedures: Immunization of transgenic mice is performed as described (Alexander et al., J. Immunol. 159:4753-4761, 1997). For example, A2/K^{b} mice, which are transgenic for the human HLA A2.1 allele and are useful for the assessment of the immunogenicity of HLA-A*0201 motif- or HLA-A2 supermotif-bearing epitopes, are primed subcutaneously (base of the tail) with a 0.1 ml of peptide in Incomplete Freund's Adjuvant, or if the peptide composition is a lipidated CTL/HTL conjugate, in DMSO/saline or if the peptide composition is a polypeptide, in PBS or Incomplete Freund's Adjuvant. Seven days after priming, splenocytes obtained from these animals are restimulated with syngenic irradiated LPS-activated lymphoblasts coated with peptide.

[0528] Cell lines: Target cells for peptide-specific cytotoxicity assays are Jurkat cells transfected with the HLA-A2.1/K^{b} chimeric gene (e.g., Vitiello et al., J. Exp. Med. 173:1007, 1991).

[0529] In vitro CTL activation: One week after priming, spleen cells (30×10⁶ cells/flask) are co-cultured at 37° C. with syngeneic, irradiated (3000 rads), peptide coated lymphoblasts (10×10⁶ cells/flask) in 10 ml of culture medium/T25 flask. After six days, effector cells are harvested and assayed for cytotoxic activity.

[0530] Assay for cytotoxic activity: Target cells (1.0 to 1.5×10⁶) are incubated at 37° C. in the presence of 200 μl of ⁵¹Cr. After 60 minutes, cells are washed three times and resuspended in R10 medium. Peptide is added where required at a concentration of 1 μg/ml. For the assay, 10^{4 51} Cr-labeled target cells are added to different concentrations of effector cells (final volume of 200 μl) in U-bottom 96-well plates. After a 6 hour incubation period at 37° C., a 0.1 ml aliquot of supernatant is removed from each well and radioactivity is determined in a Micromedic automatic gamma counter. The percent specific lysis is determined by the formula: percent specific release=100×(experimental release−spontaneous release)/(maximum release−spontaneous release). To facilitate comparison between separate CTL assays run under the same conditions, % ⁵¹Cr release data is expressed as lytic units/10⁶ cells. One lytic unit is arbitrarily defined as the number of effector cells required to achieve 30% lysis of 10,000 target cells in a 6 hour ⁵¹Cr release assay. To obtain specific lytic units/10⁶, the lytic units/10⁶ obtained in the absence of peptide is subtracted from the lytic units/10⁶ obtained in the presence of peptide. For example, if 30% ⁵¹Cr release is obtained at the effector (E): target (T) ratio of 50:1 (i.e., 5×10⁵ effector cells for 10,000 targets) in the absence of peptide and 5:1 (i.e., 5×10⁴ effector cells for 10,000 targets) in the presence of peptide, the specific lytic units would be: [( 1/50,000)−( 1/500,000)]×10⁶=18 LU.

[0531] The results are analyzed to assess the magnitude of the CTL responses of animals injected with the immunogenic CTL/HTL conjugate vaccine preparation and are compared to the magnitude of the CTL response achieved using the CTL epitope as outlined in above. Analyses similar to this may be performed to evaluate the immunogenicity of peptide conjugates containing multiple CTL epitopes and/or multiple HTL epitopes. In accordance with these procedures it is found that a CTL response is induced, and concomitantly that an HTL response is induced upon administration of such compositions.

### Example 6

### Selection of CTL and HTL Epitopes for Inclusion in an HIV-Specific Vaccine

[0532] This example illustrates the procedure for the selection of peptide epitopes for vaccine compositions of the invention. The peptides in the composition can be in the form of a nucleic acid sequence, either single or one or more sequences (i.e., minigene) that encodes peptide(s), or can be single and/or polyepitopic peptides.

[0533] The following principles are utilized when selecting an array of epitopes for inclusion in a vaccine composition. Each of the following principles is balanced in order to make the selection.

[0534] Epitopes are selected which, upon administration, mimic immune responses that correlate with virus clearance. For example, if it has been observed that patients who clear HIV generate an immune response to at least 3 epitopes on at least one HIV antigen, then 3-4 epitopes should be included for HLA class I. A similar rationale is used to determine HLA class II epitopes.

[0535] When selecting an array of HIV epitopes, it is preferred that at least some of the epitopes are derived from early and late proteins. The early proteins of HIV are expressed when the virus is replicating, either following acute or dormant infection. Therefore, it is particularly preferred to use epitopes from early stage proteins to alleviate disease manifestations at the earliest stage possible.

[0536] Epitopes are often selected that have a binding affinity of an IC₅₀ of 500 nM or less for an HLA class I molecule, or for class II, an IC₅₀ of 1000 nM or less.

[0537] Sufficient supermotif bearing peptides, or a sufficient array of allele-specific motif bearing peptides, are selected to give broad population coverage. For example, epitopes are selected to provide at least 80% population coverage. A Monte Carlo analysis, a statistical evaluation known in the art, can be employed to assess breadth, or redundancy, of population coverage.

[0538] When creating a polyepitopic compositions, e.g. a minigene, it is typically desirable to generate the smallest peptide possible that encompasses the epitopes of interest. The principles employed are similar, if not the same, as those employed when selecting a peptide comprising nested epitopes.

[0539] In cases where the sequences of multiple variants of the same target protein are available, potential peptide epitopes can also be selected on the basis of their conservancy. For example, a criterion for conservancy may define that the entire sequence of an HLA class I binding peptide or the entire 9-mer core of a class II binding peptide be conserved in a designated percentage of the sequences evaluated for a specific protein antigen.

[0540] Peptide epitopes for inclusion in vaccine compositions are, for example, selected from those listed in Tables 6-9 or FIGS. 1A-4. A vaccine composition comprised of selected peptides, when administered, is safe, efficacious, and elicits an immune response similar in magnitude of an immune response that clears an acute HIV infection.

### Example 7

### Construction of Minigene Multi-Epitope DNA Plasmids

[0541] This example provides general guidance for the construction of a minigene expression plasmid. Minigene plasmids may, of course, contain various configurations of CTL and/or HTL epitopes or epitope analogs as described herein. Expression plasmids have been constructed and evaluated as described, for example, in co-pending U.S. Ser. No. 09/311,784 filed May 13, 1999 and in Ishioka et al., J. Immunol. 162:3915-3925, 1999. An example of such a plasmid for the expression of HIV epitopes is shown in FIG. 2, which illustrates the orientation of HIV peptide epitopes in a minigene construct.

[0542] A minigene expression plasmid typically includes multiple CTL and HTL peptide epitopes. In the present example, HLA-A2, -A3, -B7 supermotif-bearing peptide epitopes and HLA-A1 and -A24 motif-bearing peptide epitopes are used in conjunction with DR supermotif-bearing epitopes and/or DR3 epitopes (FIG. 2). Preferred epitopes are identified, for example, in Tables 6-9 and FIGS. 1A-4. HLA class I supermotif or motif-bearing peptide epitopes derived from multiple HIV antigens, are selected such that multiple supermotifs/motifs are represented to ensure broad population coverage. Similarly, HLA class II epitopes are selected from multiple HIV antigens to provide broad population coverage, i.e. both HLA DR-1-4-7 supermotif-bearing epitopes and HLA DR-3 motif-bearing epitopes are selected for inclusion in the minigene construct. The selected CTL and HTL epitopes are then incorporated into a minigene for expression in an expression vector.

[0543] Such a construct may additionally include sequences that direct the HTL epitopes to the endoplasmic reticulum. For example, the Ii protein may be fused to one or more HTL epitopes as described in co-pending application U.S. Ser. No. 09/311,784 filed May 13, 1999, wherein the CLIP sequence of the Ii protein is removed and replaced with an HLA class II epitope sequence os that HLA class II epitope is directed to the endoplasmic reticulum, where the epitope binds to an HLA class II molecules.

[0544] This example illustrates the methods to be used for construction of a minigene-bearing expression plasmid. Other expression vectors that may be used for minigene compositions are available and known to those of skill in the art.

[0545] The minigene DNA plasmid contains a consensus Kozak sequence and a consensus murine kappa Ig-light chain signal sequence followed by CTL and/or HTL epitopes selected in accordance with principles disclosed herein. The construct can also include, for example, The sequence encodes an open reading frame fused to the Myc and His antibody epitope tag coded for by the pcDNA 3.1 Myc-His vector.

[0546] Overlapping oligonucleotides, for example eight oligonucleotides, averaging approximately 70 nucleotides in length with 15 nucleotide overlaps, are synthesized and HPLC-purified. The oligonucleotides encode the selected peptide epitopes as well as appropriate linker nucleotides, Kozak sequence, and signal sequence. The final multiepitope minigene is assembled by extending the overlapping oligonucleotides in three sets of reactions using PCR. A Perkin/Elmer 9600 PCR machine is used and a total of 30 cycles are performed using the following conditions: 95° C. for 15 sec, annealing temperature (5° below the lowest calculated Tm of each primer pair) for 30 sec, and 72° C. for 1 min.

[0547] For the first PCR reaction, 5 μg of each of two oligonucleotides are annealed and extended: Oligonucleotides 1+2, 3+4, 5+6, and 7+8 are combined in 100 μl reactions containing Pfu polymerase buffer (1×=10 mM KCL, 10 mM (NH₄)₂SO₄, 20 mM Tris-chloride, pH 8.75, 2 mM MgSO₄, 0.1% Triton X-100, 100 μg/ml BSA), 0.25 mM each dNTP, and 2.5 U of Pfu polymerase. The full-length dimer products are gel-purified, and two reactions containing the product of 1+2 and 3+4, and the product of 5+6 and 7+8 are mixed, annealed, and extended for 10 cycles. Half of the two reactions are then mixed, and 5 cycles of annealing and extension carried out before flanking primers are added to amplify the full length product for 25 additional cycles. The full-length product is gel-purified and cloned into pCR-blunt (Invitrogen) and individual clones are screened by sequencing.

### Example 8

### The Plasmid Construct and the Degree to which it Induces Immunogenicity

[0548] The degree to which a plasmid construct, for example a plasmid constructed in accordance as above is able to induce immunogenicity can be evaluated in vitro by testing for epitope presentation by APC following transduction or transfection of the APC with an epitope-expressing nucleic acid construct. Such a study determines “antigenicity” and allows the use of human APC. The assay determines the ability of the epitope to be presented by the APC in a context that is recognized by a T cell by quantifying the density of epitope-HLA class I complexes on the cell surface. Quantitation can be performed by directly measuring the amount of peptide eluted from the APC (see, e.g., Sijts et al., J. Immunol. 156:683-692, 1996; Demotz et al., Nature 342:682-684, 1989); or the number of peptide-HLA class I complexes can be estimated by measuring the amount of lysis or lymphokine release induced by infected or transfected target cells, and then determining the concentration of peptide necessary to obtained equivalent levels of lysis or lymphokine release (see, e.g., Kageyama et al., J. Immunol. 154:567-576, 1995).

[0549] Atlernatively, immunogenicity can be evaluated through in vivo injections into mice and subsequent in vitro assessment of CTL and HTL activity, which are analysed using cytotoxicity and proliferation assays, respectively, as detailed e.g., in copending U.S. Ser. No. 09/311,784 filed May 13, 1999 and Alexander et al., Immunity 1:751-761, 1994.

[0550] For example, to assess the capacity of a DNA minigene construct (e.g., a pMin minigene construct generated as decribed in U.S. Ser. No. 09/311,784) containing at least one HLA-A2 supermotif peptide to induce CTLs in vivo, HLA-A2.1/K^{b} transgenic mice, for example, are immunized intramuscularly with 100 μg of naked cDNA. As a means of comparing the level of CTLs induced by cDNA immunization, a control group of animals is also immunized with an actual peptide composition that comprises multiple epitopes synthesized as a single polypeptide as they would be encoded by the minigene.

[0551] Splenocytes from immunized animals are stimulated twice with each of the respective compositions (peptide epitopes encoded in the minigene or the polyepitopic peptide), then assayed for peptide-specific cytotoxic activity in a ⁵¹Cr release assay. The results indicate the magnitude of the CTL response directed against the A2-restricted epitope, thus indicating the in vivo immunogenicity of the minigene vaccine and polyepitopic vaccine. It is, therefore, found that the minigene elicits immune responses directed toward the HLA-A2 supermotif peptide epitopes as does the polyepitopic peptide vaccine. A similar analysis is also performed using other HLA-A3 and HLA-B7 transgenic mouse models to assess CTL induction by HLA-A3 and HLA-B7 motif or supermotif epitopes.

[0552] To assess the capacity of a class II epitope encoding minigene to induce HTLs in vivo, DR transgenic mice, or for those epitope that cross react with the appropriate mouse MHC molecule, I-A^{b}-restricted mice, for example, are immunized intramuscularly with 100 μg of plasmid DNA. As a means of comparing the level of HTLs induced by DNA immunization, a group of control animals is also immunized with an actual peptide composition emulsified in complete Freund's adjuvant. CD4+ T cells, i.e. HTLs, are purified from splenocytes of immunized animals and stimulated with each of the respective compositions (peptides encoded in the minigene). The HTL response is measured using a ³H-thymidine incorporation proliferation assay, (see, e.g. Alexander et al. Immunity 1:751-761, 1994). The results indicate the magnitude of the HTL response, thus demonstrating the in vivo immunogenicity of the minigene.

[0553] DNA minigenes, constructed as described above or below, may also be evaluated as a vaccine in combination with a boosting agent using a prime boost protocol. The boosting agent can consist of recombinant protein (e.g. Barnett et al., Aids Res. and Human Reroviruses 14, Supplement 3:S299-S309, 1998) or recombinant vaccinia, for example, expressing a minigene or DNA encoding the complete protein of interest (see, e.g., Hanke et al., Vaccine 16:439-445, 1998; Sedegah et al., Proc. Natl. Acad. Sci USA 95:7648-53, 1998; Hanke and McMichael, Immunol. Letters 66:177-181, 1999; and Robinson et al., Nature Med. 5:526-34, 1999).

[0554] For example, the efficacy of the DNA minigene used in a prime boost protocol is initially evaluated in transgenic mice. In this example, A2.1/K^{b} transgenic mice are immunized IM with 100 μg of a DNA minigene encoding the immunogenic peptides including at least one HLA-A2 supermotif-bearing peptide. After an incubation period (ranging from 3-9 weeks), the mice are boosted IP with 10⁷ pfu/mouse of a recombinant vaccinia virus expressing the same sequence encoded by the DNA minigene. Control mice are immunized with 100 μg of DNA or recombinant vaccinia without the minigene sequence, or with DNA encoding the minigene, but without the vaccinia boost. After an additional incubation period of two weeks, splenocytes from the mice are immediately assayed for peptide-specific activity in an ELISPOT assay. Additionally, splenocytes are stimulated in vitro with the A2-restricted peptide epitopes encoded in the minigene and recombinant vaccinia, then assayed for peptide-specific activity in an IFN-γ ELISA.

[0555] It is found that the minigene utilized in a prime-boost protocol elicits greater immune responses toward the HLA-A2 supermotif peptides than with DNA alone. Such an analysis can also be performed using HLA-A11 or HLA-B7 transgenic mouse models to assess CTL induction by HLA-A3 or HLA-B7 motif or supermotif epitopes.

[0556] The use of prime boost protocols in humans is described in below.

### Example 9

### Peptide Composition for Prophylactic Uses

[0557] Vaccine compositions of the present invention can be used to prevent HIV infection in persons who are at risk for such infection. For example, a polyepitopic peptide epitope composition (or a nucleic acid comprising the same) containing multiple CTL and HTL epitopes, which are also selected to target greater than 80% of the population, is administered to individuals at risk for HIV infection.

[0558] For example, a peptide-based composition can be provided as a single polypeptide that encompasses multiple epitopes. The vaccine is typically administered in a physiological solution that comprises an adjuvant, such as Incomplete Freunds Adjuvant. The dose of peptide for the initial immunization is from about 1 to about 50,000 μg, generally 100-5,000 μg, for a 70 kg patient. The initial administration of vaccine is followed by booster dosages at 4 weeks followed by evaluation of the magnitude of the immune response in the patient, by techniques that determine the presence of epitope-specific CTL populations in a PBMC sample. Additional booster doses are administered as required. The composition is found to be both safe and efficacious as a prophylaxis against HIV infection.

[0559] Alternatively, a composition typically comprising transfecting agents can be used for the administration of a nucleic acid-based vaccine in accordance with methodologies known in the art and disclosed herein.

### Example 10

### Polyepitopic Vaccine Compositions Derived from Native HIV Sequences

[0560] A native HIV polyprotein sequence is screened, preferably using computer algorithms defined for each class I and/or class II supermotif or motif, to identify “relatively short” regions of the polyprotein that comprise multiple epitopes and is preferably less in length than an entire native antigen. This relatively short sequence that contains multiple distinct, even overlapping, epitopes is selected and used to generate a minigene construct. The construct is engineered to express the peptide, which corresponds to the native protein sequence. The “relatively short” peptide is generally less than 250 amino acids in length, often less than 100 amino acids in length, preferably less than 75 amino acids in length, and more preferably less than 50 amino acids in length. The protein sequence of the vaccine composition is selected because it has maximal number of epitopes contained within the sequence, i.e., it has a high concentration of epitopes. As noted herein, epitope motifs may be nested or overlapping, for example, two 9-mer epitopes and one 10-mer epitope can be present in a 10 amino acid peptide. Such a vaccine composition is administered for therapeutic or prophylactic purposes.

[0561] The vaccine composition will preferably include, for example, three CTL epitopes and at least one HTL epitope from HIV. This polyepitopic native sequence is administered either as a peptide or as a nucleic acid sequence which encodes the peptide. Alternatively, an analog can be made of this native sequence, whereby one or more of the epitopes comprise substitutions that alter the cross-reactivity and/or binding affinity properties of the polyepitopic peptide.

[0562] The embodiment of this example provides for the possibility that an as yet undiscovered aspect of immune system processing will apply to the native nested sequence and thereby facilitate the production of therapeutic or prophylactic immune response-inducing vaccine compositions. Additionally such an embodiment provides for the possibility of motif-bearing epitopes for an HLA makeup that is presently unknown. Furthermore, this embodiment (absent analogs) directs the immune response to multiple peptide sequences that are actually present in native HIV antigens thus avoiding the need to evaluate any junctional epitopes. Lastly, the embodiment provides an economy of scale when producing nucleic acid vaccine compositions.

[0563] Related to this embodiment, computer programs can be derived in accordance with principles in the art, which identify in a target sequence, the greatest number of epitopes per sequence length.

### Example 11

### Polyepitopic Vaccine Compositions Directed to Multiple Diseases

[0564] The HIV peptide epitopes of the present invention are used in conjunction with peptide epitopes from target antigens related to one or more other diseases, to create a vaccine composition that is useful for the prevention or treatment of HIV as well as the one or more other disease(s). Examples of the other diseases include, but are not limited to, HCV and HBV.

[0565] For example, a polyepitopic peptide composition comprising multiple CTL and HTL epitopes that target greater than 98% of the population may be created for administration to individuals at risk for both HBV and HIV infection. The composition can be provided as a single polypeptide that incorporates the multiple epitopes from the various disease-associated sources, or can be administered as a composition comprising one or more discrete epitopes.

### Example 12

### Use of Peptides to Evaluate an Immune Response

[0566] Peptides of the invention may be used to analyze an immune response for the presence of specific CTL or HTL populations directed to HIV. Such an analysis may be performed in a manner as that described by Ogg et al., Science 279:2103-2106, 1998. In the following example, peptides in accordance with the invention are used as a reagent for diagnostic or prognostic purposes, not as an immunogen.

[0567] In this example highly sensitive human leukocyte antigen tetrameric complexes (“tetramers”) are used for a cross-sectional analysis of, for example, HIV HLA-A*0201-specific CTL frequencies from HLA A*0201-positive individuals at different stages of infection or following immunization using an HIV peptide containing an A*0201 motif Tetrameric complexes are synthesized as described (Musey et al., N. Engl. J. Med. 337:1267, 1997). Briefly, purified HLA heavy chain (A*0201 in this example) and β2-microglobulin are synthesized by means of a prokaryotic expression system. The heavy chain is modified by deletion of the transmembrane-cytosolic tail and COOH-terminal addition of a sequence containing a BirA enzymatic biotinylation site. The heavy chain, β2-microglobulin, and peptide are refolded by dilution. The 45-kD refolded product is isolated by fast protein liquid chromatography and then biotinylated by BirA in the presence of biotin. (Sigma, St. Louis, Mo.), adenosine 5′triphosphate and magnesium. Streptavidin-phycoerythrin conjugate is added in a 1:4 molar ratio, and the tetrameric product is concentrated to 1 mg/ml. The resulting product is referred to as tetramer-phycoerythrin.

[0568] For the analysis of patient blood samples, approximately one million PBMCs are centrifuged at 300×g for 5 minutes and resuspended in 50 pd of cold phosphate-buffered saline. Tri-color analysis is performed with the tetramer-phycoerythrin, along with anti-CD8-Tricolor, and anti-CD38. The PBMCs are incubated with tetramer and antibodies on ice for 30 to 60 min and then washed twice before formaldehyde fixation. Gates are applied to contain >99.98% of control samples. Controls for the tetramers include both A*0201-negative individuals and A*0201-positive uninfected donors. The percentage of cells stained with the tetramer is then determined by flow cytometry. The results indicate the number of cells in the PBMC sample that contain epitope-restricted CTLs, thereby readily indicating the extent of immune response to the HIV epitope, and thus the stage of infection with HIV, the status of exposure to HIV, or exposure to a vaccine that elicits a protective or therapeutic response.

### Example 13

### Use of Peptide Epitopes to Evaluate Recall Responses

[0569] The peptide epitopes of the invention are used as reagents to evaluate T cell responses, such as acute or recall responses, in patients. Such an analysis may be performed on patients who have recovered from infection, who are chronically infected with HIV, or who have been vaccinated with an HIV vaccine.

[0570] For example, the class I restricted CTL response of persons who have been vaccinated may be analyzed. The vaccine may be any HIV vaccine. PBMC are collected from vaccinated individuals and HLA typed. Appropriate peptide epitopes of the invention that, optimally, bear supermotifs to provide cross-reactivity with multiple HLA supertype family members, are then used for analysis of samples derived from individuals who bear that HLA type.

[0571] PBMC from vaccinated individuals are separated on Ficoll-Histopaque density gradients (Sigma Chemical Co., St. Louis, Mo.), washed three times in HBSS (GIBCO Laboratories), resuspended in RPMI-1640 (GIBCO Laboratories) supplemented with L-glutamine (2 mM), penicillin (50 U/ml), streptomycin (50 μg/ml), and Hepes (10 mM) containing 10% heat-inactivated human AB serum (complete RPMI) and plated using microculture formats. A synthetic peptide comprising an epitope of the invention is added at 10 μg/ml to each well and HBV core 128-140 epitope is added at 1 μg/ml to each well as a source of T cell help during the first week of stimulation.

[0572] In the microculture format, 4×10⁵ PBMC are stimulated with peptide in 8 replicate cultures in 96-well round bottom plate in 100 μl/well of complete RPMI. On days 3 and 10, 100 ml of complete RPMI and 20 U/ml final concentration of rIL-2 are added to each well. On day 7 the cultures are transferred into a 96-well flat-bottom plate and restimulated with peptide, rIL-2 and 10⁵ irradiated (3,000 rad) autologous feeder cells. The cultures are tested for cytotoxic activity on day 14. A positive CTL response requires two or more of the eight replicate cultures to display greater than 10% specific ⁵¹Cr release, based on comparison with uninfected control subjects as previously described (Rehermann, et al., Nature Med. 2:1104,1108, 1996; Rehermann et al., J. Clin. Invest. 97:1655-1665, 1996; and Rehermann et al. J. Clin. Invest. 98:1432-1440, 1996).

[0573] Target cell lines are autologous and allogeneic EBV-transformed B-LCL that are either purchased from the American Society for Histocompatibility and Immunogenetics (ASHI, Boston, Mass.) or established from the pool of patients as described (Guilhot, et al. J. Virol. 66:2670-2678, 1992).

[0574] Cytotoxicity assays are performed in the following manner. Target cells consist of either allogeneic HLA-matched or autologous EBV-transformed B lymphoblastoid cell line that are incubated overnight with the synthetic peptide epitope of the invention at 10 μM, and labeled with 100 μCi of ⁵¹Cr (Amersham Corp., Arlington Heights, Ill.) for 1 hour after which they are washed four times with HBSS.

[0575] Cytolytic activity is determined in a standard 4-h, split well ⁵¹Cr release assay using U-bottomed 96 well plates containing 3,000 targets/well. Stimulated PBMC are tested at effector/target (E/T) ratios of 20-50:1 on day 14. Percent cytotoxicity is determined from the formula: 100×[(experimental release-spontaneous release)/maximum release-spontaneous release)]. Maximum release is determined by lysis of targets by detergent (2% Triton X-100; Sigma Chemical Co., St. Louis, Mo.). Spontaneous release is <25% of maximum release for all experiments.

[0576] The results of such an analysis indicate the extent to which HLA-restricted CTL populations have been stimulated by previous exposure to HIV or an HIV vaccine.

[0577] The class II restricted HTL responses may also be analyzed. Purified PBMC are cultured in a 96-well flat bottom plate at a density of 1.5×10⁵ cells/well and are stimulated with 10 μg/ml synthetic peptide, whole antigen, or PHA. Cells are routinely plated in replicates of 4-6 wells for each condition. After seven days of culture, the medium is removed and replaced with fresh medium containing 10 U/ml IL-2. Two days later, 1 μCi ³H-thymidine is added to each well and incubation is continued for an additional 18 hours. Cellular DNA is then harvested on glass fiber mats and analyzed for ³H-thymidine incorporation. Antigen-specific T cell proliferation is calculated as the ratio of ³H-thymidine incorporation in the presence of antigen divided by the ³H-thymidine incorporation in the absence of antigen.

### Example 14

### Induction of Specific CTL Response in Humans

[0578] A human clinical trial for an immunogenic composition comprising CTL and HTL epitopes of the invention is set up as an IND Phase I, dose escalation study and carried out as a randomized, double-blind, placebo-controlled trial. Such a trial is designed, for example, as follows:

[0579] A total of about 27 subjects are enrolled and divided into 3 groups:

Group I: 3 subjects are injected with placebo and 6 subjects are injected with 5 μg of peptide composition;

Group II: 3 subjects are injected with placebo and 6 subjects are injected with 50 μg peptide composition;

Group III: 3 subjects are injected with placebo and 6 subjects are injected with 500 μg of peptide composition.

[0580] After 4 weeks following the first injection, all subjects receive a booster inoculation at the same dosage.

[0581] The endpoints measured in this study relate to the safety and tolerability of the peptide composition as well as its immunogenicity. Cellular immune responses to the peptide composition are an index of the intrinsic activity of this the peptide composition, and can therefore be viewed as a measure of biological efficacy. The following summarize the clinical and laboratory data that relate to safety and efficacy endpoints.

[0582] Safety: The incidence of adverse events is monitored in the placebo and drug treatment group and assessed in terms of degree and reversibility.

[0583] Evaluation of Vaccine Efficacy: For evaluation of vaccine efficacy, subjects are bled before and after injection. Peripheral blood mononuclear cells are isolated from fresh heparinized blood by Ficoll-Hypaque density gradient centrifugation, aliquoted in freezing media and stored frozen. Samples are assayed for CTL and HTL activity.

[0584] The vaccine is found to be both safe and efficacious.

### Example 15

### Phase II Trials in Patients Infected with HIV

[0585] Phase II trials are performed to study the effect of administering the CTL-HTL peptide compositions to HIV-infected patients. The main objectives of the trials are to determine an effective dose and regimen for inducing CTLs in chronically infected HIV patients, to establish the safety of inducing a CTL and HTL response in these patients, and to see to what extent activation of CTLs improves the clinical picture of chronically infected HIV patients, as manifested by a reduction in viral load and an increase in CD4⁺ cells counts. Such a study is designed, for example, as follows:

[0586] The studies are performed in multiple centers. The trial design is an open-label, uncontrolled, dose escalation protocol wherein the peptide composition is administered as a single dose followed six weeks later by a single booster shot of the same dose. The dosages are 50, 500 and 5,000 micrograms per injection. Drug-associated adverse effects (severity and reversibility) are recorded.

[0587] There are three patient groupings. The first group is injected with 50 micrograms of the peptide composition and the second and third groups with 500 and 5,000 micrograms of peptide composition, respectively. The patients within each group range in age from 21-65, include both males and females, and represent diverse ethnic backgrounds. All of them are infected with HIV for over five years and are HCV, HBV and delta hepatitis virus (HDV) negative, but have positive levels of HIV antigen.

[0588] The viral load and CD4⁺ levels are monitored to assess the effects of administering the peptide compositions. The vaccine composition is found to be both safe and efficacious in the treatment HIV infection.

### Example 16

### Induction of CTL Responses Using a Prime Boost Protocol

[0589] A prime boost protocol can also be used for the administration of the vaccine to humans. Such a vaccine regimen can include an initial administration of, for example, naked DNA followed by a boost using recombinant virus encoding the vaccine, or recombinant protein/polypeptide or a peptide mixture administered in an adjuvant.

[0590] For example, the initial, immunization is performed using an expression vector, such as that constructed above, in the form of naked nucleic acid administered IM (or SC or ID) in the amounts of 0.5-5 mg at multiple sites. The nucleic acid (0.1 to 1000 μg) can also be administered using a gene gun. Following an incubation period of 3-4 weeks, a booster dose is then administered. The booster is, for example, recombinant fowlpox virus administered at a dose of 5-10⁷ to 5×10⁹ pfu. An alternative recombinant virus, such as an MVA, canarypox, adenovirus, or adeno-associated virus, can also be used for the booster, or the polyepitopic protein or a mixture of the peptides can be administered. For evaluation of vaccine efficacy, patient blood samples are obtained before immunization as well as at intervals following administration of the initial vaccine and booster doses of the vaccine. Peripheral blood mononuclear cells are isolated from fresh heparinized blood by Ficoll-Hypaque density gradient centrifugation, aliquoted in freezing media and stored frozen. Samples are assayed for CTL and HTL activity.

[0591] Analysis of the results indicates that a magnitude of sufficient response to achieve protective immunity against HIV is generated.

### Example 17

### Administration of Vaccine Compositions Using Dendritic Cells

[0592] Vaccines comprising peptide epitopes of the invention can be administered using APCs, or “professional” APCs such as DC. In this example, the peptide-pulsed DC are administered to a patient to stimulate a CTL response in vivo. In this method, dendritic cells are isolated, expanded, and pulsed with a vaccine comprising peptide CTL and HTL epitopes of the invention. The dendritic cells are infused back into the patient to elicit CTL and HTL responses in vivo. The induced CTL and HTL then destroy or facilitate destruction of the specific target cells that bear the proteins from which the epitopes in the vaccine are derived.

[0593] For example, a cocktail of epitope-bearing peptides is administered ex vivo to PBMC, or isolated DC therefrom. A pharmaceutical to facilitate harvesting of DC can be used, such as Progenipoietin™ (Monsanto, St. Louis, Mo.) or GM-CSF/IL-4. After pulsing the DC with peptides and prior to reinfusion into patients, the DC are washed to remove unbound peptides.

[0594] As appreciated clinically, and readily determined by one of skill based on clinical outcomes, the number of DC reinfused into the patient can vary (see, e.g., Nature Med. 4:328, 1998; Nature Med. 2:52, 1996 and Prostate 32:272, 1997). Although 2-50×10⁶ DC per patient are typically administered, larger number of DC, such as 10⁷ or 10⁸ can also be provided. Such cell populations typically contain between 50-90% DC.

[0595] In some embodiments, peptide-loaded PBMC are injected into patients without purification of the DC. For example, PBMC containing DC generated after treatment with an agent such as Progenipoietin™ are injected into patients without purification of the DC. The total number of PBMC that are administered often ranges from 10⁸ to 10¹⁰. Generally, the cell doses injected into patients is based on the percentage of DC in the blood of each patient, as determined, for example, by immunofluorescence analysis with specific anti-DC antibodies. Thus, for example, if Progenipoietin™ mobilizes 2% DC in the peripheral blood of a given patient, and that patient is to receive 5×10⁶ DC, then the patient will be injected with a total of 2.5×10⁸ peptide-loaded PBMC. The percent DC mobilized by an agent such as Progenipoietin™ is typically estimated to be between 2-10%, but can vary as appreciated by one of skill in the art.

Ex Vivo ACTIVATION of CTL/HTL Responses

[0596] Alternatively, ex vivo CTL or HTL responses to HIV antigens can be induced by incubating in tissue culture the patient's, or genetically compatible, CTL or HTL precursor cells together with a source of APC, such as DC, and the appropriate immunogenic peptides. After an appropriate incubation time (typically about 7-28 days), in which the precursor cells are activated and expanded into effector cells, the cells are infused back into the patient, where they will destroy or facilitate destruction of their specific target cells.

[0597] It is understood that the examples and embodiments described herein are for illustrative purposes only and that various modifications or changes in light thereof will be suggested to persons skilled in the art and are to be included within the spirit and purview of this application and scope of the appended claims. All publications, patents, patent applications and sequence listings cited herein are hereby incorporated by reference in their entirety for all purposes.

LENGTHY TABLE REFERENCED HERE
US20070054262A1-20070308-T00001
Please refer to the end of the specification for access instructions.

LENGTHY TABLE REFERENCED HERE
US20070054262A1-20070308-T00002
Please refer to the end of the specification for access instructions.

LENGTHY TABLE REFERENCED HERE
US20070054262A1-20070308-T00003
Please refer to the end of the specification for access instructions.

LENGTHY TABLE REFERENCED HERE
US20070054262A1-20070308-T00004
Please refer to the end of the specification for access instructions.

LENGTHY TABLE REFERENCED HERE
US20070054262A1-20070308-T00005
Please refer to the end of the specification for access instructions.

LENGTHY TABLE REFERENCED HERE
US20070054262A1-20070308-T00006
Please refer to the end of the specification for access instructions.

LENGTHY TABLE REFERENCED HERE
US20070054262A1-20070308-T00007
Please refer to the end of the specification for access instructions.

LENGTHY TABLE REFERENCED HERE
US20070054262A1-20070308-T00008
Please refer to the end of the specification for access instructions.

LENGTHY TABLE REFERENCED HERE
US20070054262A1-20070308-T00009
Please refer to the end of the specification for access instructions.

LENGTHY TABLE REFERENCED HERE
US20070054262A1-20070308-T00010
Please refer to the end of the specification for access instructions.

LENGTHY TABLE REFERENCED HERE
US20070054262A1-20070308-T00011
Please refer to the end of the specification for access instructions.

LENGTHY TABLE REFERENCED HERE
US20070054262A1-20070308-T00012
Please refer to the end of the specification for access instructions.

LENGTHY TABLE REFERENCED HERE
US20070054262A1-20070308-T00013
Please refer to the end of the specification for access instructions.

LENGTHY TABLE REFERENCED HERE
US20070054262A1-20070308-T00014
Please refer to the end of the specification for access instructions.

LENGTHY TABLE REFERENCED HERE
US20070054262A1-20070308-T00015
Please refer to the end of the specification for access instructions.

LENGTHY TABLE REFERENCED HERE
US20070054262A1-20070308-T00016
Please refer to the end of the specification for access instructions.

LENGTHY TABLE REFERENCED HERE
US20070054262A1-20070308-T00017
Please refer to the end of the specification for access instructions.

LENGTHY TABLE REFERENCED HERE
US20070054262A1-20070308-T00018
Please refer to the end of the specification for access instructions.

LENGTHY TABLE REFERENCED HERE
US20070054262A1-20070308-T00019
Please refer to the end of the specification for access instructions.

LENGTHY TABLE REFERENCED HERE
US20070054262A1-20070308-T00020
Please refer to the end of the specification for access instructions.

LENGTHY TABLE REFERENCED HERE
US20070054262A1-20070308-T00021
Please refer to the end of the specification for access instructions.

LENGTHY TABLE REFERENCED HERE
US20070054262A1-20070308-T00022
Please refer to the end of the specification for access instructions.

LENGTHY TABLE REFERENCED HERE
US20070054262A1-20070308-T00023
Please refer to the end of the specification for access instructions.

LENGTHY TABLE REFERENCED HERE
US20070054262A1-20070308-T00024
Please refer to the end of the specification for access instructions.

LENGTHY TABLE REFERENCED HERE
US20070054262A1-20070308-T00025
Please refer to the end of the specification for access instructions.

LENGTHY TABLE REFERENCED HERE
US20070054262A1-20070308-T00026
Please refer to the end of the specification for access instructions.

LENGTHY TABLE REFERENCED HERE
US20070054262A1-20070308-T00027
Please refer to the end of the specification for access instructions.

LENGTHY TABLE REFERENCED HERE
US20070054262A1-20070308-T00028
Please refer to the end of the specification for access instructions.

LENGTHY TABLE REFERENCED HERE
US20070054262A1-20070308-T00029
Please refer to the end of the specification for access instructions.

LENGTHY TABLE
The patent application contains a lengthy table section. A copy of the table is available in electronic form from the USPTO web site (http://seqdata.uspto.gov/?pageRequest=docDetail&DocID=US20070054262A1). An electronic copy of the table will also be available from the USPTO upon request and payment of the fee set forth in 37 CFR 1.19(b)(3).

The application's sequence listing, which the Patent Office published only in electronic form, follows.

SEQUENCE LISTING (1946 sequences)

SEQ ID NO: 1 - protein, 10 aa, Artificial
  Gag 545 variant
EPLTSLKSLF

SEQ ID NO: 2 - protein, 10 aa, Artificial
  Gag 545 variant
YPLASLKSLF

SEQ ID NO: 3 - protein, 14 aa, Artificial
  Tetanus toxoid
QYIKANSKFIGITE

SEQ ID NO: 4 - protein, 21 aa, Plasmodium falciparum
DIEKKIAKMEKASSVFNVVNS

SEQ ID NO: 5 - protein, 16 aa, Streptococcus sp.
GAVDSILGGVATYGAA

SEQ ID NO: 6 - protein, 13 aa, Artificial
  Pan-DR-binding epitope
  PEPTIDE (1)..(1): X can be D-alanine or L-alanine.
  PEPTIDE (3)..(3): X can be cyclohexylalanine, phenylalanine, or tyrosine.
  PEPTIDE (7)..(7): X can be tryptophan, tyrosine, histidine, or asparagine.
  PEPTIDE (13)..(13): X can be D-alanine or L-alanine.
XKXVAAXTLKAAX

SEQ ID NO: 7 - protein, 10 aa, Artificial
  Gag 545 variant
EPLTSLKSLF

SEQ ID NO: 8 - protein, 10 aa, Artificial
  Gag 545 variant
YPLASLKSLF

SEQ ID NO: 9 - protein, 9 aa, Artificial
  HLA-A2-restricted epitope
KLTPLCVTL

SEQ ID NO: 10 - protein, 9 aa, Artificial
  Gag 386 sequence
VLAEAMSQV

SEQ ID NO: 11 - protein, 9 aa, Human immunodeficiency virus
RILQQLLFI

SEQ ID NO: 12 - protein, 10 aa, Artificial
  HLA-A3/11-restricted epitope
VSIKVGGQIK

SEQ ID NO: 13 - protein, 11 aa, Human immunodeficiency virus
VTVYYGVPVWK

SEQ ID NO: 14 - protein, 9 aa, Artificial
  Gag 386 variant
ILAEAMSKA

SEQ ID NO: 15 - protein, 9 aa, Artificial
  Gag 386 variant
VLAEAMSQI

SEQ ID NO: 16 - protein, 9 aa, Artificial
  Gag 386 variant
VLAEAMSQA

SEQ ID NO: 17 - protein, 9 aa, Artificial
  Gag 386 variant
ILAEAMSKA

SEQ ID NO: 18 - protein, 9 aa, Artificial
  Env 134 variant
KITPLCVTL

SEQ ID NO: 19 - protein, 9 aa, Artificial
  Env 134 variant
QLTPLCVTL

SEQ ID NO: 20 - protein, 9 aa, Artificial
  Env 134 variant
QITPLCVTL

SEQ ID NO: 21 - protein, 9 aa, Artificial
  Env 134 variant
ELTPLCVTL

SEQ ID NO: 22 - protein, 9 aa, Artificial
  Env 134 variant
KLTPFCVTL

SEQ ID NO: 23 - protein, 9 aa, Artificial
  Env 134 variant
KLTPLCVIL

SEQ ID NO: 24 - protein, 9 aa, Artificial
  Env 134 variant
KLTPLCVPL

SEQ ID NO: 25 - protein, 9 aa, Artificial
  Gag 271 variant
MTNNPPIPV

SEQ ID NO: 26 - protein, 9 aa, Artificial
  Gag 271 variant
MTSNPPIPV

SEQ ID NO: 27 - protein, 13 aa, Artificial
  Pan-DR-binding epitope
  PEPTIDE (1)..(1): X can be D-alanine or L-alanine.
  PEPTIDE (3)..(3): X can be cyclohexylalanine, phenylalanine, or tyrosine.
  PEPTIDE (7)..(7): X can be tryptophan, tyrosine, histidine, or asparagine.
  PEPTIDE (13)..(13): X can be D-alanine or L-alanine.
XKXVAAXTLKAAX

SEQ ID NO: 28 - protein, 13 aa, Artificial
  Pan-DR-binding epitope
  PEPTIDE (1)..(1): X is D-alanine.
  PEPTIDE (3)..(3): X is cyclohexylalanine.
  PEPTIDE (13)..(13): X is D-alanine.
XKXVAAWTLKAAX

SEQ ID NO: 29 - protein, 13 aa, Artificial
  Pan-DR-binding epitope
  PEPTIDE (1)..(1): X is D-alanine.
  PEPTIDE (13)..(13): X is D-alanine.
XKFVAAWTLKAAX

SEQ ID NO: 30 - protein, 13 aa, Artificial
  Pan-DR-binding epitope
  PEPTIDE (1)..(1): X is D-alanine.
  PEPTIDE (13)..(13): X is D-alanine.
XKYVAAWTLKAAX

SEQ ID NO: 31 - protein, 13 aa, Artificial
  Pan-DR-binding epitope
  PEPTIDE (1)..(1): X is D-alanine.
  PEPTIDE (13)..(13): X is D-alanine.
XKFVAAYTLKAAX

SEQ ID NO: 32 - protein, 13 aa, Artificial
  Pan-DR-binding epitope
  PEPTIDE (1)..(1): X can be D-alanine.
  PEPTIDE (3)..(3): X can be cyclohexylalanine.
  PEPTIDE (13)..(13): X can be D-alanine.
XKXVAAYTLKAAX

SEQ ID NO: 33 - protein, 13 aa, Artificial
  Pan-DR-binding epitope
  PEPTIDE (1)..(1): X is D-alanine.
  PEPTIDE (13)..(13): X is D-alanine.
XKYVAAYTLKAAX

SEQ ID NO: 34 - protein, 13 aa, Artificial
  Pan-DR-binding epitope
  PEPTIDE (1)..(1): X is D-alanine.
  PEPTIDE (13)..(13): X is D-alanine.
XKFVAAHTLKAAX

SEQ ID NO: 35 - protein, 13 aa, Artificial
  Pan-DR-binding epitope
  PEPTIDE (1)..(1): X is D-alanine.
  PEPTIDE (3)..(3): X is cyclohexylalanine.
  PEPTIDE (13)..(13): X is D-alanine.
XKXVAAHTLKAAX

SEQ ID NO: 36 - protein, 13 aa, Artificial
  Pan-DR-binding epitope
  PEPTIDE (1)..(1): X is D-alanine.
  PEPTIDE (13)..(13): X is D-alanine.
XKYVAAHTLKAAX

SEQ ID NO: 37 - protein, 13 aa, Artificial
  Pan-DR-binding epitope
  PEPTIDE (1)..(1): X is D-alanine.
  PEPTIDE (13)..(13): X is D-alanine.
XKFVAANTLKAAX

SEQ ID NO: 38 - protein, 13 aa, Artificial
  Pan-DR-binding epitope
  PEPTIDE (1)..(1): X is D-alanine.
  PEPTIDE (3)..(3): X is cyclohexylalanine.
  PEPTIDE (13)..(13): X is D-alanine.
XKXVAANTLKAAX

SEQ ID NO: 39 - protein, 13 aa, Artificial
  Pan-DR-binding epitope
  PEPTIDE (1)..(1): X is D-alanine.
  PEPTIDE (13)..(13): X is D-alanine.
XKYVAANTLKAAX

SEQ ID NO: 40 - protein, 13 aa, Artificial
  Pan-DR-binding epitope
  PEPTIDE (3)..(3): X is cyclohexylalanine.
AKXVAAWTLKAAA

SEQ ID NO: 41 - protein, 13 aa, Artificial
  Pan-DR-binding epitope
AKFVAAWTLKAAA

SEQ ID NO: 42 - protein, 13 aa, Artificial
  Pan-DR-binding epitope
AKYVAAWTLKAAA

SEQ ID NO: 43 - protein, 13 aa, Artificial
  Pan-DR-binding epitope
AKFVAAYTLKAAA

SEQ ID NO: 44 - protein, 13 aa, Artificial
  Pan-DR-binding epitope
  PEPTIDE (3)..(3): X is cyclohexylalanine.
AKXVAAYTLKAAA

SEQ ID NO: 45 - protein, 13 aa, Artificial
  Pan-DR-binding epitope
AKYVAAYTLKAAA

SEQ ID NO: 46 - protein, 13 aa, Artificial
  Pan-DR-binding epitope
AKFVAAHTLKAAA

SEQ ID NO: 47 - protein, 13 aa, Artificial
  Pan-DR-binding epitope
  PEPTIDE (3)..(3): X is cyclohexylalanine.
AKXVAAHTLKAAA

SEQ ID NO: 48 - protein, 13 aa, Artificial
  Pan-DR-binding epitope
AKYVAAHTLKAAA

SEQ ID NO: 49 - protein, 13 aa, Artificial
  Pan-DR-binding epitope
AKFVAANTLKAAA

SEQ ID NO: 50 - protein, 13 aa, Artificial
  Pan-DR-binding epitope
  PEPTIDE (3)..(3): X is cyclohexylalanine.
AKXVAANTLKAAA

SEQ ID NO: 51 - protein, 13 aa, Artificial
  Pan-DR-binding epitope
AKYVAANTLKAAA

SEQ ID NO: 52 - protein, 14 aa, Artificial
  Pan-DR-binding epitope
  PEPTIDE (1)..(1): X is D-alanine.
  PEPTIDE (3)..(3): X is cyclohexylalanine.
  PEPTIDE (13)..(13): X is D-alanine.
  PEPTIDE (14)..(14): X denotes amidation at the C-terminus.
XKXVAAWTLKAAXX

SEQ ID NO: 53 - protein, 9 aa, Artificial
  Gag 386
VLAEAMSQV

SEQ ID NO: 54 - protein, 9 aa, Artificial
  Gag 386
VLAEAMSQA

SEQ ID NO: 55 - protein, 9 aa, Artificial
  Gag 386
VLAEAMSQI

SEQ ID NO: 56 - protein, 9 aa, Artificial
  Gag 386
VLAEAMSKV

SEQ ID NO: 57 - protein, 9 aa, Artificial
  Gag 386
VLAEAMSKA

SEQ ID NO: 58 - protein, 9 aa, Artificial
  Gag 386
ILAEAMSQA

SEQ ID NO: 59 - protein, 9 aa, Artificial
  Gag 386
ILAEAMSKA

SEQ ID NO: 60 - protein, 9 aa, Artificial
  Gag 386
VLAEAMAAA

SEQ ID NO: 61 - protein, 9 aa, Artificial
  Env 134
KLTPLCVTL

SEQ ID NO: 62 - protein, 9 aa, Artificial
  Env 134
KITPLCVTL

SEQ ID NO: 63 - protein, 9 aa, Artificial
  Env 134
QLTPLCVTL

SEQ ID NO: 64 - protein, 9 aa, Artificial
  Env 134
QITPLCVTL

SEQ ID NO: 65 - protein, 9 aa, Artificial
  Env 134
ELTPLCVTL

SEQ ID NO: 66 - protein, 9 aa, Artificial
  Env 134
KLTPFCVTL

SEQ ID NO: 67 - protein, 9 aa, Artificial
  Env 134
KLTPLCVIL

SEQ ID NO: 68 - protein, 9 aa, Artificial
  Env 134
KLTPLCVPL

SEQ ID NO: 69 - protein, 9 aa, Artificial
  HIV-1090 Epitope
ILKEPVHGV

SEQ ID NO: 70 - protein, 9 aa, Artificial
  HIV-1090 Epitope
VLAEAMSQV

SEQ ID NO: 71 - protein, 9 aa, Artificial
  HIV-1090 Epitope
KLVGKLNWA

SEQ ID NO: 72 - protein, 9 aa, Artificial
  HIV-1090 Epitope
KLTPLCVTL

SEQ ID NO: 73 - protein, 9 aa, Artificial
  HIV-1090 Epitope
RILQQLLFI

SEQ ID NO: 74 - protein, 9 aa, Artificial
  HIV-1090 Epitope
LTFGWCFKL

SEQ ID NO: 75 - protein, 9 aa, Artificial
  HIV-1090 Epitope
MTNNPPIPV

SEQ ID NO: 76 - protein, 11 aa, Artificial
  HIV-1090 Epitope
VTVYYGVPVWK

SEQ ID NO: 77 - protein, 10 aa, Artificial
  HIV-1090 Epitope
QMAVFIHNFK

SEQ ID NO: 78 - protein, 10 aa, Artificial
  HIV-1090 Epitope
VTIKIGGQLK

SEQ ID NO: 79 - protein, 10 aa, Artificial
  HIV-1090 Epitope
KIQNFRVYYR

SEQ ID NO: 80 - protein, 9 aa, Artificial
  HIV-1090 Epitope
AIFQSSMTK

SEQ ID NO: 81 - protein, 11 aa, Artificial
  HIV-1090 Epitope
KVYLAWVPAHK

SEQ ID NO: 82 - protein, 10 aa, Artificial
  HIV-1090 Epitope
TTLFCASDAK

SEQ ID NO: 83 - protein, 9 aa, Artificial
  HIV-1090 Epitope
FPVRPQVPL

SEQ ID NO: 84 - protein, 10 aa, Artificial
  HIV-1090 Epitope
YPLASLRSLF

SEQ ID NO: 85 - protein, 8 aa, Artificial
  HIV-1090 Epitope
VPLQLPPL

SEQ ID NO: 86 - protein, 9 aa, Artificial
  HIV-1090 Epitope
IPIHYCAPA

SEQ ID NO: 87 - protein, 9 aa, Artificial
  HIV-1090 Epitope
HPVHAGPIA

SEQ ID NO: 88 - protein, 11 aa, Artificial
  HIV-1090 Epitope
IPYNPQSQGVV

SEQ ID NO: 89 - protein, 9 aa, Artificial
  HIV-1090 Epitope
CPKVSFEPI

SEQ ID NO: 90 - protein, 9 aa, Artificial
  HIV Peptide
ILKEPVHGV

SEQ ID NO: 91 - protein, 9 aa, Artificial
  HIV Peptide
ILREPVHGV

SEQ ID NO: 92 - protein, 9 aa, Artificial
  HIV Peptide
ILKEPVHGA

SEQ ID NO: 93 - protein, 9 aa, Artificial
  HIV Peptide
ILKDPVHGV

SEQ ID NO: 94 - protein, 9 aa, Artificial
  HIV Peptide
KLKEPVHGV

SEQ ID NO: 95 - protein, 9 aa, Artificial
  HIV Peptide
ILKDPVHGA

SEQ ID NO: 96 - protein, 9 aa, Artificial
  HIV Peptide
ILKNPVHGV

SEQ ID NO: 97 - protein, 9 aa, Artificial
  HIV Peptide
VLAEAMSQA

SEQ ID NO: 98 - protein, 9 aa, Artificial
  HIV Peptide
VLAEAMSQV

SEQ ID NO: 99 - protein, 9 aa, Artificial
  HIV Peptide
VLAEAMSQT

SEQ ID NO: 100 - protein, 9 aa, Artificial
  HIV Peptide
VLAEAMSHA

SEQ ID NO: 101 - protein, 9 aa, Artificial
  HIV Peptide
ILAEAMSQV

SEQ ID NO: 102 - protein, 9 aa, Artificial
  HIV Peptide
ILAEAMSQA

SEQ ID NO: 103 - protein, 9 aa, Artificial
  HIV Peptide
VLAEAMSHV

SEQ ID NO: 104 - protein, 9 aa, Artificial
  HIV Peptide
KLVGKLNWA

SEQ ID NO: 105 - protein, 9 aa, Artificial
  HIV Peptide
KLIGKLNWA

SEQ ID NO: 106 - protein, 9 aa, Artificial
  HIV Peptide
KLTPLCVTL

SEQ ID NO: 107 - protein, 9 aa, Artificial
  HIV Peptide
QLTPLCVTL

SEQ ID NO: 108 - protein, 9 aa, Artificial
  HIV Peptide
KLTPLCVAL

SEQ ID NO: 109 - protein, 9 aa, Artificial
  HIV Peptide
RLTPLCVTL

SEQ ID NO: 110 - protein, 9 aa, Artificial
  HIV Peptide
KITPLCVTL

SEQ ID NO: 111 - protein, 9 aa, Artificial
  HIV Peptide
RILQQLLFI

SEQ ID NO: 112 - protein, 9 aa, Artificial
  HIV Peptide
RILQQLLFV

SEQ ID NO: 113 - protein, 9 aa, Artificial
  HIV Peptide
RTLQQLLFI

SEQ ID NO: 114 - protein, 9 aa, Artificial
  HIV Peptide
RTLQQLLFV

SEQ ID NO: 115 - protein, 9 aa, Artificial
  HIV Peptide
RILQQLLFT

SEQ ID NO: 116 - protein, 9 aa, Artificial
  HIV Peptide
RMLQQLLFI

SEQ ID NO: 117 - protein, 9 aa, Artificial
  HIV Peptide
RVLQQLLFI

SEQ ID NO: 118 - protein, 9 aa, Artificial
  HIV Peptide
LTFGWCFKL

SEQ ID NO: 119 - protein, 9 aa, Artificial
  HIV Peptide
LTFGWCYKL

SEQ ID NO: 120 - protein, 9 aa, Artificial
  HIV Peptide
LTLGWCFKL

SEQ ID NO: 121 - protein, 9 aa, Artificial
  HIV Peptide
MTSNPPIPV

SEQ ID NO: 122 - protein, 9 aa, Artificial
  HIV Peptide
MTNNPPIPV

SEQ ID NO: 123 - protein, 9 aa, Artificial
  HIV Peptide
MTSNPPVPV

SEQ ID NO: 124 - protein, 9 aa, Artificial
  HIV Peptide
MTGNPPIPV

SEQ ID NO: 125 - protein, 9 aa, Artificial
  HIV Peptide
MTGNPPVPV

SEQ ID NO: 126 - protein, 9 aa, Artificial
  HIV Peptide
MTNNPPVPV

SEQ ID NO: 127 - protein, 9 aa, Artificial
  HIV Peptide
MTANPPVPV

SEQ ID NO: 128 - protein, 11 aa, Artificial
  HIV Peptide
VTVYYGVPVWK

SEQ ID NO: 129 - protein, 11 aa, Artificial
  HIV Peptide
VTVYYGVPVWR

SEQ ID NO: 130 - protein, 11 aa, Artificial
  HIV Peptide
VTIYYGVPVWK

SEQ ID NO: 131 - protein, 10 aa, Artificial
  HIV Peptide
QMAVFIHNFK

SEQ ID NO: 132 - protein, 10 aa, Artificial
  HIV Peptide
QMAVFVHNFK

SEQ ID NO: 133 - protein, 10 aa, Artificial
  HIV Peptide
QMAVFVHNYK

SEQ ID NO: 134 - protein, 10 aa, Artificial
  HIV Peptide
VSIKVGGQIK

SEQ ID NO: 135 - protein, 10 aa, Artificial
  HIV Peptide
VTIKIGGQLK

SEQ ID NO: 136 - protein, 10 aa, Artificial
  HIV Peptide
VTVKIGGQLK

SEQ ID NO: 137 - protein, 10 aa, Artificial
  HIV Peptide
VTVRIGGQLK

SEQ ID NO: 138 - protein, 10 aa, Artificial
  HIV Peptide
VSIKVGGQIR

SEQ ID NO: 139 - protein, 10 aa, Artificial
  HIV Peptide
VSIRVGGQIK

SEQ ID NO: 140 - protein, 10 aa, Artificial
  HIV Peptide
VTIRIGGQLK

SEQ ID NO: 141 - protein, 10 aa, Artificial
  HIV Peptide
VTVKIGGQLR

SEQ ID NO: 142 - protein, 10 aa, Artificial
  HIV Peptide
VTVKVGGQLK

SEQ ID NO: 143 - protein, 10 aa, Artificial
  HIV Peptide
KIQNFRVYYR

SEQ ID NO: 144 - protein, 9 aa, Artificial
  HIV Peptide
AIFQSSMTK

SEQ ID NO: 145 - protein, 9 aa, Artificial
  HIV Peptide
AIFQCSMTK

SEQ ID NO: 146 - protein, 9 aa, Artificial
  HIV Peptide
AIFQSSMTR

SEQ ID NO: 147 - protein, 9 aa, Artificial
  HIV Peptide
AIFQASMTK

SEQ ID NO: 148 - protein, 9 aa, Artificial
  HIV Peptide
SIFQSSMTK

SEQ ID NO: 149 - protein, 9 aa, Artificial
  HIV Peptide
AIFQYSMTK

SEQ ID NO: 150 - protein, 9 aa, Artificial
  HIV Peptide
AIFQSTMTK

SEQ ID NO: 151 - protein, 11 aa, Artificial
  HIV Peptide
KVYLSWVPAHK

SEQ ID NO: 152 - protein, 11 aa, Artificial
  HIV Peptide
RVYLSWVPAHK

SEQ ID NO: 153 - protein, 11 aa, Artificial
  HIV Peptide
KVYLAWVPAHK

SEQ ID NO: 154 - protein, 11 aa, Artificial
  HIV Peptide
KVYLTWVPAHK

SEQ ID NO: 155 - protein, 11 aa, Artificial
  HIV Peptide
KIYLSWVPAHK

SEQ ID NO: 156 - protein, 11 aa, Artificial
  HIV Peptide
RIYLSWVPAHK

SEQ ID NO: 157 - protein, 11 aa, Artificial
  HIV Peptide
KIYLAWVPAHK

SEQ ID NO: 158 - protein, 11 aa, Artificial
  HIV Peptide
QVYLTWVPAHK

SEQ ID NO: 159 - protein, 10 aa, Artificial
  HIV Peptide
TTLFCASDAK

SEQ ID NO: 160 - protein, 10 aa, Artificial
  HIV Peptide
ATLFCASDAK

SEQ ID NO: 161 - protein, 10 aa, Artificial
  HIV Peptide
TILFCASDAK

SEQ ID NO: 162 - protein, 10 aa, Artificial
  HIV Peptide
PTLFCASDAK

SEQ ID NO: 163 - protein, 10 aa, Artificial
  HIV Peptide
TTLFCASDAR

SEQ ID NO: 164 - protein, 10 aa, Artificial
  HIV Peptide
TTLFCASEAK

SEQ ID NO: 165 - protein, 10 aa, Artificial
  HIV Peptide
ATLFCASDAR

SEQ ID NO: 166 - protein, 9 aa, Artificial
  HIV Peptide
FPVRPQVPL

SEQ ID NO: 167 - protein, 9 aa, Artificial
  HIV Peptide
FPVKPQVPL

SEQ ID NO: 168 - protein, 9 aa, Artificial
  HIV Peptide
FPVRPQVPV

SEQ ID NO: 169 - protein, 10 aa, Artificial
  HIV Peptide
EPLTSLKSLF

SEQ ID NO: 170 - protein, 10 aa, Artificial
  HIV Peptide
YPLASLKSLF

SEQ ID NO: 171 - protein, 10 aa, Artificial
  HIV Peptide
YPLASLRSLF

SEQ ID NO: 172 - protein, 10 aa, Artificial
  HIV Peptide
YPLTSLKSLF

SEQ ID NO: 173 - protein, 10 aa, Artificial
  HIV Peptide
YPPLASLKSL

SEQ ID NO: 174 - protein, 10 aa, Artificial
  HIV Peptide
YPLTSLRSLF

SEQ ID NO: 175 - protein, 10 aa, Artificial
  HIV Peptide
YPPLTSLKSL

SEQ ID NO: 176 - protein, 8 aa, Artificial
  HIV Peptide
VPLQLPPL

SEQ ID NO: 177 - protein, 8 aa, Artificial
  HIV Peptide
VPLQLPPI

SEQ ID NO: 178 - protein, 8 aa, Artificial
  HIV Peptide
VPFQLPPI

SEQ ID NO: 179 - protein, 8 aa, Artificial
  HIV Peptide
VPFQLPPL

SEQ ID NO: 180 - protein, 9 aa, Artificial
  HIV Peptide
IPIHYCAPA

SEQ ID NO: 181 - protein, 9 aa, Artificial
  HIV Peptide
IPIHYCTPA

SEQ ID NO: 182 - protein, 9 aa, Artificial
  HIV Peptide
IPIHFCAPA

SEQ ID NO: 183 - protein, 9 aa, Artificial
  HIV Peptide
HPVHAGPIA

SEQ ID NO: 184 - protein, 9 aa, Artificial
  HIV Peptide
HPVHAGPVA

SEQ ID NO: 185 - protein, 9 aa, Artificial
  HIV Peptide
HPVQAGPVA

SEQ ID NO: 186 - protein, 9 aa, Artificial
  HIV Peptide
HPIHAGPIA

SEQ ID NO: 187 - protein, 11 aa, Artificial
  HIV Peptide
IPYNPQSQGVV

SEQ ID NO: 188 - protein, 11 aa, Artificial
  HIV Peptide
IPYNPQSQGVI

SEQ ID NO: 189 - protein, 11 aa, Artificial
  HIV Peptide
IPYNPQSQGAV

SEQ ID NO: 190 - protein, 9 aa, Artificial
  HIV Peptide
CPKVSFEPI

SEQ ID NO: 191 - protein, 9 aa, Artificial
  HIV Peptide
CPKVSFDPI

SEQ ID NO: 192 - protein, 9 aa, Artificial
  HIV Peptide
CPKVTFDPI

SEQ ID NO: 193 - protein, 9 aa, Artificial
  HIV Peptide
CPKVTFEPI

SEQ ID NO: 194 - protein, 9 aa, Artificial
  HIV Peptide
CPKISFDPI

SEQ ID NO: 195 - protein, 9 aa, Artificial
  HIV Peptide
CPKISFEPI

SEQ ID NO: 196 - protein, 9 aa, Artificial
  HIV Peptide
CPKVSWDPI

SEQ ID NO: 197 - protein, 9 aa, Artificial
  HIV Peptide
CPKVSFQPI

SEQ ID NO: 198 - protein, 8 aa, Artificial
  HLA-A2 Restricted HPV Peptide
TLGIVCPI

SEQ ID NO: 199 - protein, 8 aa, Artificial
  HLA-A2 Restricted HPV Peptide
TLSFVCPW

SEQ ID NO: 200 - protein, 8 aa, Artificial
  HLA-A2 Restricted HPV Peptide
SFGIVCPN

SEQ ID NO: 201 - protein, 8 aa, Artificial
  HLA-A2 Restricted HPV Peptide
TVNIVCPT

SEQ ID NO: 202 - protein, 8 aa, Artificial
  HLA-A2 Restricted HPV Peptide
TLSFVCPW

SEQ ID NO: 203 - protein, 8 aa, Artificial
  HLA-A2 Restricted HPV Peptide
TLQVVCPG

SEQ ID NO: 204 - protein, 8 aa, Artificial
  HLA-A2 Restricted HPV Peptide
ALTVTCPL

SEQ ID NO: 205 - protein, 8 aa, Artificial
  HLA-A2 Restricted HPV Peptide
TCTIVCPS

SEQ ID NO: 206 - protein, 9 aa, Artificial
  HLA-A2 Restricted HPV Peptide
KLPQLCTEL

SEQ ID NO: 207 - protein, 9 aa, Artificial
  HLA-A2 Restricted HPV Peptide
KLPDLCTEL

SEQ ID NO: 208 - protein, 9 aa, Artificial
  HLA-A2 Restricted HPV Peptide
KLHELSSAL

SEQ ID NO: 209 - protein, 9 aa, Artificial
  HLA-A2 Restricted HPV Peptide
TLHDLCQAL

SEQ ID NO: 210 - protein, 9 aa, Artificial
  HLA-A2 Restricted HPV Peptide
KLPDLCTEL

SEQ ID NO: 211 - protein, 9 aa, Artificial
  HLA-A2 Restricted HPV Peptide
TLHELCEVL

SEQ ID NO: 212 - protein, 9 aa, Artificial
  HLA-A2 Restricted HPV Peptide
SLHHLSEVL

SEQ ID NO: 213 - protein, 9 aa, Artificial
  HLA-A2 Restricted HPV Peptide
TLHDLCQAL

SEQ ID NO: 214 - protein, 9 aa, Artificial
  HLA-A2 Restricted HPV Peptide
KLPQLCTEL

SEQ ID NO: 215 - protein, 9 aa, Artificial
  HLA-A2 Restricted HPV Peptide
KLPDLCTEL

SEQ ID NO: 216 - protein, 9 aa, Artificial
  HLA-A2 Restricted HPV Peptide
KLHELSSAL

SEQ ID NO: 217 - protein, 9 aa, Artificial
  HLA-A2 Restricted HPV Peptide
TLHDLCQAL

SEQ ID NO: 218 - protein, 9 aa, Artificial
  HLA-A2 Restricted HPV Peptide
KLPDLCTEL

SEQ ID NO: 219 - protein, 9 aa, Artificial
  HLA-A2 Restricted HPV Peptide
TLHELCEVL

SEQ ID NO: 220 - protein, 9 aa, Artificial
  HLA-A2 Restricted HPV Peptide
SLHHLSEVL

SEQ ID NO: 221 - protein, 9 aa, Artificial
  HLA-A2 Restricted HPV Peptide
TLHDLCQAL

SEQ ID NO: 222 - protein, 9 aa, Artificial
  HLA-A2 Restricted HPV Peptide
ELQTTIHDI

SEQ ID NO: 223 - protein, 9 aa, Artificial
  HLA-A2 Restricted HPV Peptide
ELNTSLQDI

SEQ ID NO: 224 - protein, 9 aa, Artificial
  HLA-A2 Restricted HPV Peptide
ALEIPYDEL

SEQ ID NO: 225 - protein, 9 aa, Artificial
  HLA-A2 Restricted HPV Peptide
ALETTIHNI

SEQ ID NO: 226 - protein, 9 aa, Artificial
  HLA-A2 Restricted HPV Peptide
ELNTSLQDV

SEQ ID NO: 227 - protein, 9 aa, Artificial
  HLA-A2 Restricted HPV Peptide
VLEESVHEI

SEQ ID NO: 228 - protein, 9 aa, Artificial
  HLA-A2 Restricted HPV Peptide
VLEIPLIDL

SEQ ID NO: 229 - protein, 9 aa, Artificial
  HLA-A2 Restricted HPV Peptide
ALETSVHEI

SEQ ID NO: 230 - protein, 9 aa, Artificial
  HLA-A2 Restricted HPV Peptide
FAFRDLCIV

SEQ ID NO: 231 - protein, 9 aa, Artificial
  HLA-A2 Restricted HPV Peptide
FAFKDLFVV

SEQ ID NO: 232 - protein, 9 aa, Artificial
  HLA-A2 Restricted HPV Peptide
FAFTDLTIV

SEQ ID NO: 233 - protein, 9 aa, Artificial
  HLA-A2 Restricted HPV Peptide
FAFADLTVV

SEQ ID NO: 234 - protein, 9 aa, Artificial
  HLA-A2 Restricted HPV Peptide
FAFKDLCIV

SEQ ID NO: 235 - protein, 9 aa, Artificial
  HLA-A2 Restricted HPV Peptide
FLFTDLRIV

SEQ ID NO: 236 - protein, 9 aa, Artificial
  HLA-A2 Restricted HPV Peptide
FACTELKLV

SEQ ID NO: 237 - protein, 9 aa, Artificial
  HLA-A2 Restricted HPV Peptide
FVFADLRIV

SEQ ID NO: 238 - protein, 9 aa, Artificial
  HLA-A2 Restricted HPV Peptide
FAFRDLCIV

SEQ ID NO: 239 - protein, 9 aa, Artificial
  HLA-A2 Restricted HPV Peptide
FAFKDLFVV

SEQ ID NO: 240 - protein, 9 aa, Artificial
  HLA-A2 Restricted HPV Peptide
FAFTDLTIV

SEQ ID NO: 241 - protein, 9 aa, Artificial
  HLA-A2 Restricted HPV Peptide
FAFADLTVV

SEQ ID NO: 242 - protein, 9 aa, Artificial
  HLA-A2 Restricted HPV Peptide
FAFKDLCIV

SEQ ID NO: 243 - protein, 9 aa, Artificial
  HLA-A2 Restricted HPV Peptide
FLFTDLRIV

SEQ ID NO: 244 - protein, 9 aa, Artificial
  HLA-A2 Restricted HPV Peptide
FACTELKLV

SEQ ID NO: 245 - protein, 9 aa, Artificial
  HLA-A2 Restricted HPV Peptide
FVFADLRIV

SEQ ID NO: 246 - protein, 9 aa, Artificial
  HLA-A2 Restricted HPV Peptide
FAFRDLCIV

SEQ ID NO: 247 - protein, 9 aa, Artificial
  HLA-A2 Restricted HPV Peptide
FAFKDLFVV

SEQ ID NO: 248 - protein, 9 aa, Artificial
  HLA-A2 Restricted HPV Peptide
FAFTDLTIV

SEQ ID NO: 249 - protein, 9 aa, Artificial
  HLA-A2 Restricted HPV Peptide
FAFADLTVV

SEQ ID NO: 250 - protein, 9 aa, Artificial
  HLA-A2 Restricted HPV Peptide
FAFKDLCIV

SEQ ID NO: 251 - protein, 9 aa, Artificial
  HLA-A2 Restricted HPV Peptide
FLFTDLRIV

SEQ ID NO: 252 - protein, 9 aa, Artificial
  HLA-A2 Restricted HPV Peptide
FACTELKLV

SEQ ID NO: 253 - protein, 9 aa, Artificial
  HLA-A2 Restricted HPV Peptide
FVFADLRIV

SEQ ID NO: 254 - protein, 9 aa, Artificial
  HLA-A2 Restricted HPV Peptide
FAFRDLCIV

SEQ ID NO: 255 - protein, 9 aa, Artificial
  HLA-A2 Restricted HPV Peptide
FAFKDLFVV

SEQ ID NO: 256 - protein, 9 aa, Artificial
  HLA-A2 Restricted HPV Peptide
FAFTDLTIV

SEQ ID NO: 257 - protein, 9 aa, Artificial
  HLA-A2 Restricted HPV Peptide
FAFADLTVV

SEQ ID NO: 258 - protein, 9 aa, Artificial
  HLA-A2 Restricted HPV Peptide
FAFKDLCIV

SEQ ID NO: 259 - protein, 9 aa, Artificial
  HLA-A2 Restricted HPV Peptide
FLFTDLRIV

SEQ ID NO: 260 - protein, 9 aa, Artificial
  HLA-A2 Restricted HPV Peptide
FACTELKLV

SEQ ID NO: 261 - protein, 9 aa, Artificial
  HLA-A2 Restricted HPV Peptide
FVFADLRIV

SEQ ID NO: 262 - protein, 9 aa, Artificial
  HLA-A2 Restricted HPV Peptide
TLHEYMLDL

SEQ ID NO: 263 - protein, 9 aa, Artificial
  HLA-A2 Restricted HPV Peptide
TLQDIVLHL

SEQ ID NO: 264 - protein, 9 aa, Artificial
  HLA-A2 Restricted HPV Peptide
TLQDYVLDL

SEQ ID NO: 265 - protein, 9 aa, Artificial
  HLA-A2 Restricted HPV Peptide
TLKEYVLDL

SEQ ID NO: 266 - protein, 9 aa, Artificial
  HLA-A2 Restricted HPV Peptide
TLQEIVLHL

SEQ ID NO: 267 - protein, 9 aa, Artificial
  HLA-A2 Restricted HPV Peptide
TIKDYILDL

SEQ ID NO: 268 - protein, 9 aa, Artificial
  HLA-A2 Restricted HPV Peptide
TLQDVVLEL

SEQ ID NO: 269 - protein, 9 aa, Artificial
  HLA-A2 Restricted HPV Peptide
TLREYILDL

SEQ ID NO: 270 - protein, 9 aa, Artificial
  HLA-A2 Restricted HPV Peptide
LLMGTLGIV

SEQ ID NO: 271 - protein, 9 aa, Artificial
  HLA-A2 Restricted HPV Peptide
LFLNTLSFV

SEQ ID NO: 272 - protein, 9 aa, Artificial
  HLA-A2 Restricted HPV Peptide
LLMGSFGIV

SEQ ID NO: 273 - protein, 9 aa, Artificial
  HLA-A2 Restricted HPV Peptide
LLMGTVNIV

SEQ ID NO: 274 - protein, 9 aa, Artificial
  HLA-A2 Restricted HPV Peptide
LFLSTLSFV

SEQ ID NO: 275 - protein, 9 aa, Artificial
  HLA-A2 Restricted HPV Peptide
MLLGTLQVV

SEQ ID NO: 276 - protein, 9 aa, Artificial
  HLA-A2 Restricted HPV Peptide
LLMGALTVT

SEQ ID NO: 277 - protein, 9 aa, Artificial
  HLA-A2 Restricted HPV Peptide
LLMGTCTIV

SEQ ID NO: 278 - protein, 9 aa, Artificial
  HLA-A2 Restricted HPV Peptide
LLMGTLGIV

SEQ ID NO: 279 - protein, 9 aa, Artificial
  HLA-A2 Restricted HPV Peptide
LFLNTLSFV

SEQ ID NO: 280 - protein, 9 aa, Artificial
  HLA-A2 Restricted HPV Peptide
LLMGSFGIV

SEQ ID NO: 281 - protein, 9 aa, Artificial
  HLA-A2 Restricted HPV Peptide
LLMGTVNIV

SEQ ID NO: 282 - protein, 9 aa, Artificial
  HLA-A2 Restricted HPV Peptide
LFLSTLSFV

SEQ ID NO: 283 - protein, 9 aa, Artificial
  HLA-A2 Restricted HPV Peptide
MLLGTLQVV

SEQ ID NO: 284 - protein, 9 aa, Artificial
  HLA-A2 Restricted HPV Peptide
LLMGALTVT

SEQ ID NO: 285 - protein, 9 aa, Artificial
  HLA-A2 Restricted HPV Peptide
LLMGTCTIV

SEQ ID NO: 286 - protein, 9 aa, Artificial
  HLA-A2 Restricted HPV Peptide
LLMGTLGIV

SEQ ID NO: 287 - protein, 9 aa, Artificial
  HLA-A2 Restricted HPV Peptide
LFLNTLSFV

SEQ ID NO: 288 - protein, 9 aa, Artificial
  HLA-A2 Restricted HPV Peptide
LLMGSFGIV

SEQ ID NO: 289 - protein, 9 aa, Artificial
  HLA-A2 Restricted HPV Peptide
LLMGTVNIV

SEQ ID NO: 290 - protein, 9 aa, Artificial
  HLA-A2 Restricted HPV Peptide
LFLSTLSFV

SEQ ID NO: 291 - protein, 9 aa, Artificial
  HLA-A2 Restricted HPV Peptide
MLLGTLQVV

SEQ ID NO: 292 - protein, 9 aa, Artificial
  HLA-A2 Restricted HPV Peptide
LLMGALTVT

SEQ ID NO: 293 - protein, 9 aa, Artificial
  HLA-A2 Restricted HPV Peptide
LLMGTCTIV

SEQ ID NO: 294 - protein, 9 aa, Artificial
  HLA-A2 Restricted HPV Peptide
LLMGTLGIV

SEQ ID NO: 295 - protein, 9 aa, Artificial
  HLA-A2 Restricted HPV Peptide
LFLNTLSFV

SEQ ID NO: 296 - protein, 9 aa, Artificial
  HLA-A2 Restricted HPV Peptide
LLMGSFGIV

SEQ ID NO: 297 - protein, 9 aa, Artificial
  HLA-A2 Restricted HPV Peptide
LLMGTVNIV

SEQ ID NO: 298 - protein, 9 aa, Artificial
  HLA-A2 Restricted HPV Peptide
LFLSTLSFV

SEQ ID NO: 299 - protein, 9 aa, Artificial
  HLA-A2 Restricted HPV Peptide
MLLGTLQVV

SEQ ID NO: 300 - protein, 9 aa, Artificial
  HLA-A2 Restricted HPV Peptide
LLMGALTVT

SEQ ID NO: 301 - protein, 9 aa, Artificial
  HLA-A2 Restricted HPV Peptide
LLMGTCTIV

SEQ ID NO: 302 - protein, 492 aa, Artificial Sequence
  HIV Gag
MGARASILRGEKLDKWEKIRLRPGGRKHYMIKHIVWASRELERFALNPGLLETSEGCKQIIKQLQPALQTGTEELRSLYNTVATLYCVHKKIDVRDTKEALDQIEKEQNQSQQKTQQAETADKKVSQNYPIVQNIQGQMVHQSLSPRTLNAWVKVIEEKAFSPEVIPMFTALSEGATPQDLNTMLNTVGGHQAAMQMLKDTINEEAAEWDRLHPVHAGPIAPGQMREPRGSDIAGTTSTLQEQIAWMTSNPPVPVGEIYKRWIILGLNKIVRMYSPVSILDIKQGPKEPFRDYVDRFFKTLRAEQATQEVKNWMTDTLLVQNANPDCKTILRALGPGASLEEMMTACQGVGGPSHKARVLAEAMSQANNTNIMLQKNNFKGPRRIVKCFNCGKEGHIARNCRAPRKKGCWKCGKEGHQMKDCTERQANFLGKIWPSHKGRPGNFLQSRPEPTAPPAESFKFEETNPTPKQEPKDREPLTSLKSLFGSDPLSQ

SEQ ID NO: 303 - protein, 492 aa, Artificial Sequence
  HIV Gag
MGARASVLRGEKLDKWEKIRLRPGGKKHYMLKHLVWASRELERFALNPGLLETSEGCKQIIKQLQPALQTGTEELRSLFNTVATPYCVHEKIEVRDTKEALDKMEEEQNKSQQKTQQAEAAAGKVSQNYPIVQNLQGQMVHQALSPRTLNAWVKVIEEKAFSPEVIPMFTALSEGATPQDLNTMLNTVGGHQAAMQMLKDTINEEAAEWDRVHPAHAGPVAPGQMREPRGSDIAGTTSNLQEQIAWMTANPPVPVGEIYKRWIILGLNKIVRMYSPVSILDIRQGPKEPFRDYVDRFFKTLRAEQATQDVKNWMTDTLLVQNANPDCKTILRALGPGATLEEMMTACQGVGGPSHKARVLAEAMSQHNTSIMMQKSNFKGPKRIVKCFNCGKEGHIARNCRAPRKKGCWKCGKEGHQMKDCTERQANFLGKIWPSHKGRPGNFLQNRPEPTAPPAESFKFEETTTPAPKQELKDREPLTALKSLFGSDPLSQ

SEQ ID NO: 304 - protein, 502 aa, Artificial Sequence
  HIV Gag
MGARASILRGGKLDTWEKIRLRPGGKKQYMIKHLVWASRELERFALNPGLLETAEGCRQIIKQLHPALQTGTEELRSLYNTVATLYCVHRGIEIRDTKEALDKIEKEQNESQQKTQQAKAADGKVSQNYPIVQNLQGQMVHNPISPRTLNAWVKVIEEKAFSPEVIPMFTALSEGATPQDLNTMLNTVGGHQAAMQMLKDTINEEAAEWDRVHPVHAGPVAPGQMREPRGSDIAGTTSTLQEQIAWMTSNPPIPVGDIYKRWIILGLNKIVRMYSPVSILDIKQGPKEPFRDYVDRFFKTLRAEQATQEVKNWMTDTLLVQNANPDCKTILRGLGPGASLEEMMTACQGVGGPSHKARVLAEAMSQSNSIMMQRSNFKGHKRIVKCFNCGKEGHIAKNCRAPRKKGCWKCGKEGHQMKDCTERQANFLGKIWPSHKGRPGNFLQNRPEPSAPPAESLRPEPSAPPAESLRFEETTPALKRELKEREPLISLKSLFGNDPLSQ

SEQ ID NO: 305 - protein, 489 aa, Artificial Sequence
  HIV Gag
MGARASILRGGKLDTWEKIRLRPGGKKHYMLKHLVWASRELERFALNPGLLETADGCKQIIKQLQPALQTGTEELRSLFNTVATLYCVHKGIKVQDTKEALDKIEEEQNKCQQQAKAAEGKVSQNYPIVQNAQGQMVHQSISPRTLNAWVKVIEEKAFSPEVIPMFTALSEGATPSDLNTMLNTVGGHQAAMQMLKDTINEEVAEWDRLHPVQAGPIAPGQMRDPRGSDIAGTTSTLQEQVAWMTSNPPVPVGDIYKRWIILGLNKIVRMYSPVSILDIKQGPKEPFRDYVDRFFKTLRAEQATQDVKNWMTDTLLVQNANPDCKTILRALGPGATLEEMMTACQGVGGPSHKARVLAEAMSQANNTNVMMQKGNFKGPRRVIKCFNCGKEGHLARNCRAPRKKGCWKCGKEGHQMKECTERQANFLGKIWPSQKGRPGNFLQNRPEPSAPPAESFRFEETTPAPKQEPKDREPLTSLKSLFGSDPLSQ

SEQ ID NO: 306 - protein, 501 aa, Artificial Sequence
  HIV Gag
MGARASILRGGKLDEWEKIRLRPGGKKRYMMKHLVWASRELERFALNPGLLETSDGCKQIMKQLQPALQTGTEELKSLFNTVATLYCVHANIDVRDTKEALDKLEEEQNKSQQETQQQTKAADGKISHNYPIVQNLQGQMVHQAISPRTLNAWVKVIEEKAFSPEVIPMFTALSEGATPQDLNTMLNTVGGHQAAMQMLKDTINEEAAEWDRMHPVQAGPVAPGQMRDPRGSDIAGTTSTLQEQIAWMTSNPPVPVGEIYKRWIILGLNKIVRMYSPVSILDIKQGPKEPFRDYVDRFFKTLRAEQATQDVKNWMTDTLLVQNANPDCKTILRALGPGATLEEMMTACQGVGGPSHKARVLAEAMSQAGNATIMMQKSNFKGPRRIVKCFNCGKEGHIARNCRAPRKKGCWKCGKEGHQMKDCTERQANFLGKIWPSHKGRPGNFLQSRPEPTAPPAPVPTAPPAESFRFGETTPSPRQEAKDREPLISLKSLFGSDPLSQ

SEQ ID NO: 307 - protein, 491 aa, Artificial Sequence
  HIV Gag
MGARASILRGGKLDTWEKIRLRPGGKKHYMIKHLVWASRELERFALNPGLLETSDGCKQIIQQLQPALKTGTEELRSLFNTVATLYCAHKGISIQDTKEALDKIEEEQNKSQQKTQQVAAAAGQVSQNYPIVQNLQGQMVHQAISPRTLNAWVKVIEEKGFNPEVIPMFTALSEGATPQDLHTMLNTVGGHQAAMQMLKDTINEEAAEWDRLHPVHAGPIAPGQMREPRGSDIAGTTSNLQEQVAWMTSNPPIPVGDIYKRWIILGLNKIVRMYSPVSILDIKQGPKEPFRDYVDRFFKTLRAEQATQDVKNWMTDTLLVQNANPDCKAILRALGPGATLEEMMTACQGVGGPSHKARVLAEAMSQANSPNILMQRSNFKGSKRVKCFNCGKEGHIARNCRAPRKRGCWKCGKEGHQMKDCTERQANFLGKIWPSHKGRPGNFLQNRPEPSAPPAESFKFEETTPAPKQEPKDREPLTSLKSLFGSDPLSQ

SEQ ID NO: 308 - protein, 492 aa, Artificial Sequence
  HIV Gag
MGARASILRGGKLDKWERIRLRPGGKKHYMLKHLVWASRELERFALNPGLLETAEGCKRIIKQLQPALQTGTEELKSLHNTVATLYCVHKEIDVRDTKEALDKIEEEQKKSQQKLQQEEAADRKVSQNYPIVQNLQGQMVHQAISPRTLNAWVKVIEEKAFSPEVIPMFTALSEGATPSDLNTMLNTVGGHQAAMQMLKDTINEEAAEWDRLHPVHAGPIAPGQMREPRGSDIAGTTSTLQEQIAWMTSNPPVPVGDIYKRWIILGLNKIVRMYSPVSILDIRQGPKEPFRDYVDRFFKTLRAEQATQEVKNWMTDTLLIQNANPDCKTILKALGPGASLEEMMTACQGVGGPGHKARVLAEAMSKANNANILMQRSNFKGPKRIVKCFNCGKEGHIARNCRAPRKKGCWKCGKEGHQMKDCTERQANFLGKIWPSHKGRPGNFLQSRPEPTAPPLESFKFEETTPAPKQEPKDRETLTSLRSLFGSDPLSQ

SEQ ID NO: 309 - protein, 492 aa, Artificial Sequence
  HIV Gag
MGASASILRGGKLDKWEKIRLRPGGKKKYRLKHLVWASRELERFALNSGLLETAEGCKQIIKQLQPALQTGTEELKSLYNTVATLYCVHAGIEVRDTKEALDKIEEEQNKCQQKTQQAKEADGKVSQNYPIVQNLQGQMVHQPISPRTLNAWVKVIEEKAFSPEVIPMFTALSEGATPQDLNTMLNTVGGHQAAMQMLKDTINEEAAEWDRLHPVHAGPVAPGQMREPRGSDIAGTTSTLQEQITWMTSNPPVPVGDIYKRWIILGLNKIVRMYSPVSILDIKQGPKEPFRDYVDRFFKVLRAEQATQDVKNWMTDTLLVQNANPDCKTILRALGPAASLEEMMTACQGVGGPSHKARVLAEAMSQANTTNIMMQKSNFKGPRRTVKCFNCGKEGHIAKNCRAPRKKGCWKCGKEGHQMKDCTERQANFLGKIWPSHKGRPGNFLQSRPEPTAPPAESFRFEETTPAPKQEPKDREPLTSLKSLFGSDPLSQ

SEQ ID NO: 310 - protein, 504 aa, Artificial Sequence
  HIV Gag
MGARASILRGGKLDTWEKIRLRPGGKKHYMMKHLVWASRELERFALNPGLLETSEGCKQIIQQLQPALKTGTEELRSLYNTVATLYCVHAKIEVRDTKEALDKIEEEQNKCQQKTQQAEKTQQAGAAGGKVSQNYPIVQNLQGQMVHQAISPRTLNAWVKVIEEKAFSPEVIPMFTALSEGATPGDLNTMLNTVGGHQAAMQMLKDTINEEAAEWDRLHPVQAGPVAPGQIREPRGSDIAGTTSTLQEQITWMTSNPPIPVGDIYKRWIVLGLNKIVRMYSPVSILDIKQGPKEPFRDYVDRFFKTLRAEQSTQEVKNWMTDTLLIQNANPDCKTILRALGQGASLEEMMTACQGVGGPGHKARVLAEAMSQVGNPQVMMQRNNLKGTRRTVKCFNCGKEGHIARNCRAPRKKGCWKCGREGHQMKDCTERQANFLGKIWPSQKGGRPGNFLQNRPAESRLEPTAPPAESFRFEETTPVQKQETKDREPLTSLKSLFGSDPLSQ

SEQ ID NO: 311 - protein, 492 aa, Artificial Sequence
  HIV Gag
MGARASILRGGKLDKWEKIRLRPGGKKHYMMKHLVWASRELERFALNPGLLETSEGCKQIMKQLQPAIQTGTEELRSLFNTVATLYCVHEGIDVQDTKEALDKVEEEQNKSQQKMQQAEAADKKVSQNYPIVQNLQGQMVHQAISPRTLNAWVKVIEDKAFSPEVIPMFTALSEGATPQDLNTMLNTVGGHQAAMQMLKDTINEEAAEWDRLHPVHAGPVAPGQMREPRGSDIAGTTSTLQEQIAWMTSNPPIPVGDIYKRWIILGLNKIVRMYSPVSILDIKQGPKEPFRDYVDRFFKTLRAEQSTQEVKNWMTDTLLVQNANPDCKTILKALGSGASLEEMMTACQGVGGPSHKARVLAEAMSQANNVQIMMQKNNFKGPRRIIKCFNCGKEGHLARNCRAPRKKGCWKCGKEGHQMKDCTERQANFLGKIWPSHKGRPGNFLQNRPEPTAPPAESFRFEETTPSPKQELKDKEPLTSLKSLFGSDPLSQ

SEQ ID NO: 312 - protein, 500 aa, Artificial Sequence
  HIV Gag
MGARASILRGGKLDKWEKIRLRPGGKKHYMLKHLVWASRELERFALNPGLLETAAGCKQIIRQLHPALQTGTEELRSLYNTVATLYCVHAEIEVRDTKEALDKIEEEQNKSQQKTQQAQEATATGKVSQNYPIVQNAQGQMVHQAISPRTLNAWVKVIEEKAFSPEVIPMFTALPEGATPQDLNTMLNTVGGHQAAMQMLKDTINEEAAEWDRLHPVHAGPIAPGQMREPRGSDIAGTTSTLQEQIAWMTNNPPIPVGDIYKRWIILGLNKIVRMYSPVSILDIKQGPKEPFRDYVDRFFKTLRAEQATQDVKNWMTETLLVQNANPDCKTILRALGPGATLEEMMTACQGVGGPGHKARVLAEAMSQTTSMQIMMQRSNFKGSKRSVKCFNCGKEGHIARNCRAPRKKGCWKCGKDGHQMKDCTERQANFLGRIWPSHKGRPGNFLQNRPEPTAPLEPTAPPAESFRFEETTPASKQEKKDRETLTSLRSLFGSDPLSQ

SEQ ID NO: 313 - protein, 492 aa, Artificial Sequence
  HIV Gag
MGARASVLKGEKLDAWEKIRLRPGEKKGYMLKHLVWASRELERFALNPGLLETSEGCRQIMRQLQPALQTGTEELRSLFNTVATLYCVHEKIPVRDTKEALDKIEEEQNKCQQKTQQTEAAAGKVSQNYPIVQNLQGQMVHQAISPRTLNAWVKVIEEKAFSPEVIPMFTALSEGATPQDLNTMLNTVGGHQAAMQMLKDTINEEAAEWDRVHPVHAGPIAPGQMREPRGSDIAGTTSTLQEQIAWMTGNPPVPVGDIYKRWIILGLNKIVRMYSPVSILDIRQGPKEPFRDYVDRFFKTLRAEQATQDVKNWMTDTLLVQNANPDCKTILRALGPGATLEEMMTACQGVGGPSHKARVLAEAMSQANNANIMMQRSNFKGPRKIIKCFNCGKEGHLARNCRAPRKKGCWKCGKEGHQMKDCTERQANFLGKIWPSHKGRPGNFLQNRPEPTAPPAESFRFEETTPAPKQEQKDREPLTSLKSLFGSDPLSQ

SEQ ID NO: 314 - protein, 492 aa, Artificial Sequence
  HIV Gag
MGARASILRGGKLDKWERIRLRPGGKKQYMIKHLVWASRELERFALNPGLLETAEGCKQIIRQLHPALQTGTQELRSLYNTVATLYCVHKDIEVRDTKEALDKIEEEQNKSQQKAQQAEAADKQVSQNYPIVQNLQGQMVHQPLSPRTLNAWVKVIEEKAFSPEVIPMFTALSEGATPQDLNTMLNTVGGHQAAMQMLKDTINEEAAEWDRLHPVHAGPVAPGQMRDPRGSDIAGTTSTLQEQITWMTSNPPIPVGDIYKRWIVLGLNKIVRMYSPVSILDIKQGPKEPFRDYVDRFFKTLRAEQATQEVKNWMTDTLLVQNANPDCKTILRALGPGASLEEMMTACQGVGGPSHKARVLAEAMSQATNTSIMMQKSNFKGPRRIVKCFNCGKEGHIAKNCRAPRKKGCWKCGKEGHQMKDCTERQANFLGKIWPSHKGRPGNFLQSRPEPTAPPAESFKFEETTPAPKQEPKDREPLTSLKSLFGNDPLSQ

SEQ ID NO: 315 - protein, 492 aa, Artificial Sequence
  HIV Gag
MGARASILRGGKLDTWEKIRLRPGGKKRYMLKHLIWTSRELERFALNPDLLETSEGCKQIIQQLQPALQTGTEELRSLYNTVATLYCVHKGIEVQDTKEALDKIEEEQNKSQQKTQQAEAAAGKVSQNYPIVQNLQGQMVHQSISPRTLNAWVKVIEEKAFSPEVIPMFTALSEGATPQDLNTMLNTVGGHQAAMQMLKDTINEEAAEWDRLHPVHAGPIAPGQLREPRGSDIAGTTSTLQEQIAWMTNNPPVPVGDIYKRWIILGLNKIVRMYSPVSILDIKQGPKEPFRDYVDRFFKTLRAEQSSQEVKNWMTDTLLVQNANPDCKTILRALGPGATLEEMMTACQGVGGPSHKARALAEAMSQANNTNIMMQKSNFKGPRRIVKCFNCGKEGHIARNCRAPRKKGCWKCGKEGHQMKDCTERQANFLGKIWPSHKGRPGNFLQSRPEPTAPPAESFRFEETTPAPKQEPKDREPLTSLKSLFGSDPLSQ

SEQ ID NO: 316 - protein, 496 aa, Artificial Sequence
  HIV Gag
MGARASILRGEKLDTWERIKLRPGGKKHYMLKHLVWASRELERFALNPGLLETSEGCKQIMKQLQPALQTGTEELRSLFNTVATLYCVHKKIQVQDTKEALDKIEEEQNTCQQKTQQAEAAAGKISQNYPIVQNLQGQMVHQAISPRTLNAWVKVIEEKAFSPEIIPMFTALSEGATPQDLNTMLNTVGGHQAAMQMLKDTINEEAAEWDRLHPVHAGPNPAGQMREPRGSDIAGTTSTLQEQIAWMTSNPPIPVGDIYKRWIILGLNKIVRMYSPVSILDIRQGPKEPFRDYVDRFFKTLRAEQATQDVKNWMTDTLLVQNANPDCKTILRALGPGATLEEMMTACQGVGGPGHKARVLAEAMSQVNGSNVLMQRGNFKGPKRIIKCFNCGKEGHLARNCRAPRKKGCWKCGKEGHQMKDCTERQANFLGKIWPSNKGRPGNFLQNRTAPPVEPTAPPAESFRFEETTPAPKQELKDREPLISLKSLFGSDPLSQ

SEQ ID NO: 317 - protein, 490 aa, Artificial Sequence
  HIV Gag
MGARASILRGGKLDKWEKIRLRPGGKKQYMIKHLVWASRELERFALNPGLLETADGCKQIMKQLQPALQTGTEELRSLYNTVATLYCVHEGIDVRDTKEALDKIEEEQQKSQQKTQQAEAADKKVSQNYPIVQNLQGQMVHQAISPRTLNAWVKVIEEKAFSPEVIPMFTALSEGATPQDLNTMLNTVGGHQAAMQMLKDTINEEAAEWDRLHPVHAGPAAPGQMREPRGSDIAGTTSTLAEQIAWMTSNPPIPVGDIYKRWIILGLNKIVRMYSPVSILDIKQGPKEPFRDYVDRFFKTLRAEQSTQEVKNWVTDTLLVQNANPDCKTILRALGPGASLEEMMTACQGVGGPGHKARVLAEAMSQANNINVMMQKNNFKGPRRLVKCFNCGKEGHIARNCRAPRKKGCWKCGKEGHQMKDCTERQANFLGKIWPSHKGRPGNFLQSRLEPTAPPAESFEETTPAPKQEMKDKEPLISLKSLLGNDPLSQ

SEQ ID NO: 318 - protein, 501 aa, Artificial Sequence
  HIV Gag
MGARASILRGGKLDTWEKIKLRPGGKKSYKLKHLVWASRELERFALNPSLLETSEGCKQIIKQLQPALQTGTEELRSLFNTVATLYCVHKGIEVRDTKEALDKIEEEQNKCQQKTQQAKAADKGEVSQNYPIVQNAQGQMVHQTISPRTLNAWVKVIEEKAFSPEVIPMFTALSEGATPQDLNTMLNTVGGHQAAMQMLKDTINEEAAEWDRLHPVHAGPVAPGQMREPRGSDIAGTTSTLQEQIAWMTNNPPIPVGDIYKRWIILGLNKIVRMYSPVSILDIKQGPKEPFRDYVDRFFKTLRAEQATQDVKNWMTDTLLVQNANPDCKTILKALGSGATLEEMMTACQGVGGPGHKARVLAEAMSQANSTNIMIQRSNFKGSKRIVKCFNCGKEGHIAKNCRAPRKKGCWKCGREGHQMKDCTERQANFLGKIWPSHKGGRPGNFLQSRPEPTAPPAEPTAPPAESFRFEETTPASKQDLKDREPLTSLKSLFGSDPLSQ

SEQ ID NO: 319 - protein, 500 aa, Artificial Sequence
  HIV Gag
  MISC_FEATURE (11)..(11): Xaa can be any amino acid
MGARASILRGXEKLDEWEKIRLRPGGRKKYRLKHLVWASRELENFALNPGLLETSEGCRQIIKQLQPALQTGTEELRSLYNTIAVLYCAHQRIKVQDTKEALDEIEEEQNKCQQKAQQEKATDGKVSQNYPIVQNLQGQMVHQALSPRTLNAWVKVIEEKAFSPEVIPMFTALSEGATPQDLNTMLNTVGGHQAAMQMLKDTINEEAAEWDRLHPVHAGPIAPGQMREPRGSDIAGTTTTLQEQINWMTSNPPIPVGEIYKRWIILGLNKIVRMYSPVSILDIKQGPKEPFRDYVDRIFKTLRAEQATQDVKNWMTETLLVQNANPDCKTILRALGSGVTLEEMMSACRGVGGPSHKARVLAEAMSQANNTNIMMQRGNFRGAKRSVKCFNCGKEGHIARNCRAPRKKGCWKCGKEGHQMKDCTERQANFLGKIWPSHKGRPGNFLQNRPEPTAPRPEPSAPPAESFRFEETTHAPKQELKDREALTSLKSLFGSDPLSQ

SEQ ID NO: 320 - protein, 503 aa, Artificial Sequence
  HIV Gag
MGARASILRGGQLDKWEKIRLRPGGKKHYMLKHLVWASGELEKFALNPGLLETSEGCKQIIKQLHPALQTGTEELKSLYNTVAVLYCVHAGIAVRDTKEALDKIEEEQNKIQQKTQQAKEADKKVSQNYPIVQNLQGQMVHQPLSPRTLNAWVKVIEEKAFSPEVIPMFTALSEGATPQDSNTMLNTVGGHQAAMQMLKDTINEEAAEWDRVHPVHAGPIAPGQMREPRGSDIAGTTSTLQEQIAWMTSNPPIPVGDIYKRWIILGLNKIVRMYSPVSILDIRQGPKEPFRDYVDRFFKTLRAEQATQDVKNWMTKTLLVQNANPDCKTILRALGPAATLVEMMTACQGVGGPSHKARVLAEAMSQTASTNILMQRSNFKGSKRSVKCFNCGKEGHIARNCRAPRKKGCWKCGKEGHQMKDCTERQANFLGRIWPSNKGRPGNFLQNRPEPTAPPAENRPEPTAPPAESFRFEETTPAPKQEPKNREPLTSLKSLFGSDPWSQ

SEQ ID NO: 321 - protein, 502 aa, Artificial Sequence
  HIV Gag
MGARASVLKGDKLDAWEKIKLRPGGKKHYMLKHLVWASRELERFALNPGLLETSEGCKQIMQQLQPALKTGTEELISLYNTVATLYCVHEKIQVQDTKEALDKIEEEQNKSQQKSQQKTQQAQAADGKVSQNYPIVQNIQGQMVHQPLSPRTLNAWVKVVEEKAFSPEVIPMFTALSEGATPQDLNTMLNTVGGHQAAMQMLKDTINEEAAEWDRLHPVHAGPVAPGQMREPRGSDIAGTTSTLQEQIAWMTSNPAIPVGDIYKRWIILGLDKIVRMYSPVSILDIKQGPKEPFRDYVDRFFKTLRAEQATQDVKNWMTDTLLVQNANPDCKTILRALGPGATLEEMMTACQGVGGPGHKARVLAEAMSQANSNIMMQRSNFKGPRKIVKCFNCGKEGHIARNCRAPRKKGCWKCGKEGHQMKDCTNDRQANFLGKLWPSNKGRPGNFLQNRTEPTAPLEPTAPPADSFKFEETTPELKQGPKDREPLTSLKSLFGSDPLSQ

SEQ ID NO: 322 - protein, 495 aa, Artificial Sequence
  HIV Gag
MGARASILRGGKLDAWERTRLRPGGKKHYRLKHLVWASRELERFALNPGLLETSEGCKQIIKQLQPALQTGTEELRSLYNTVATLYCVHQKIEIRDTKEALDKIEEEQNKCQQKTQQGKAADEKISQNYPIVQNLQGQMVHQNISPRTLNAWVKVIEEKAFSPEVIPMFTALSEGATPQDLNTMLNTVGGHQAAMQMLKDTINEEAAEWDRLHPVHAGPVAPGQMREPRGSDIAGTTSTLQEQVAWMTSNPPVPVGDIYKRWIILGLNKIVRMYSPVSILDIRQGPKEPFRDYVDRFFKTLRAEQATQDVKNWMTDTLLVQNANPDCKTILRALGPGATLEEMMTACQGVGGPGHKARVLAEAMSQANNINVMMQRSNFKGSKRIVKCFNCGKEGHIARNCRAPRKKGCWKCGREGHQMKDYTERQANFLGKIWPSHKGRPGNFLQNRPEPTAPTAPPAESFRFEEITPAPKQETKDREPLTSLKSLFGSDPLSQ

SEQ ID NO: 323 - protein, 508 aa, Artificial Sequence
  HIV Gag
MGARASVLRGEKLDTWERIKLRPGGKKHYMLKHIVWASRELERFALNPGLMETSEGCKQIIQQLQPALQTGTEELRSLFNTIATLYCVHKGIKVQDTKEALDKIEEEQNKSQQKTQQQQKTQQTEAAAGKVSQNYPIVQNLQGQMVHQAISPRTLNAWVKVVEEKGFNPEVIPMFTALSEGATPQDLNTMLNTVGGHQAAMQMLKDTINEEAAEWDRVHPVQAGPVAPGQIREPRGSDIAGTTSNLQEQITWMTSNPPIPVGEIYKRWIVLGLNKIVRMYSPVSILDIRQGPKEPFRDYVDRFFKTLRAEQATQDVKNWMTETLLVQNANPDCKTILRALGPGASLEEMMTACQGVGGPGHKARVLAEAMSQANSTNIMMQRGNFKGPKRTIKCFNCGKEGHLARNCRAPKKKGCWKCGREGHQMKDCTERQANFLGKIWPSRGGRPGNFLQNRTEPTAPPEPTAPPAESFRFEETTPAPKQEPKDRGPYREPLISLKSLFGSDPLSQ

SEQ ID NO: 324 - protein, 493 aa, Artificial Sequence
  HIV Gag
MGARASILRGGKLDTWEKIRLRPGGKKHYMLKHLVWASRELERFALNPGLLETSDGCKQIIKQLQPALQTGTEELRSLFNTVATLYCVHKGIKVQDTKEALDKIEEEQNKSQQKTQQAEAAAEKVSQNYPIVRNLQGQMVHQAISPRTLNAWVKVIEEKAFSPEVIPMFTALSEGAAPQDLNTMLNTVGGHQAAMQMLKDTINEEAAEWDRLHPVHAGPIAPGQMREPRGSDIAGTTSTLQEQIDWMTNNPPIPVGEIYKRWIILGLNKIVRMYSPVSILDIKQGPKEPFRDYVDRFFKTLRAEQATQDVKNWMTGTLLVQNANPDCKTILRALGPGATLEEMMTACQGVGGPGHKARVLAEAMSQANNSNIMMQKSNFKGPRRIIKCFNCGKEGHLARNCRAPRKRGCWKCGKEGHQMKDCTTERQANFLGKIWPSHKGRPGNFLQNRPEPTAPPAESFRFEETTPVPKQEPTDREPLTSLKSLFGSDPLSQ

SEQ ID NO: 325 - protein, 492 aa, Artificial Sequence
  HIV Gag
MGARASILKGGKLDTWEKIRLRPGGKKHYMVKHLVWASRELERFALNPGLLETSEGCEQIMKQLQPALQTGTEELRSLYNTVATLYCVHARIEVKDTKEALDKIEEEQNKRQQKAQQEKAADGKVSQNYPIVQNLQGQMVHQSLSPRTLNAWVKVIEEKAFSPEVIPMFTALSEGATPQDLNTMLNTVGGHQAAMQMLKDTINEEAAEWDRIHPVHAGPVAPGQMRDPRGSDIAGTTSTLQEQIAWMTSNPPVPVGEIYKRWIILGLNKIVRMYSPVSILDIKQGPKEPFRDYVDRFFKTLRAEQATQDVKNWMTDTLLVQNANPDCKTILKALGPGATLEEMMTACQGVGGPGHKARVLAEAMSQAGSVNILMQRGNFKGSKRIVKCFNCGKEGHIARNCRAPRKKGCWKCGKEGHQMKDCTERQANFLGKIWPSHKGRPGNFLQNRPEPTAPPAESFRFEETTPTLKQELKDREPLTSLKSLFGSDPLSQ

SEQ ID NO: 326 - protein, 499 aa, Artificial Sequence
  HIV Gag
MGARASILRGGKLDKWEKIRLRPGGKKCYMIKHIIWASRELERFALNPGLLETAEGCTQIMKQLQPALQTGTEELRSLFNTVATLYCVHAGIDVRDTKEALDKIEEEQNKSQQKTQQAQAADKKVSQNYPIVQNLQGQMVHQAISPRTLNAWVKVIEEKAFSPEVIPMFTALSEGATPQDLNTMLNTVGGHQAAMQMLKDTINEEAAEWDRLHPVHAGPIAPGQMREPRGSDIAGTTSTLQEQIAWMTNNPPVPVGDIYKRWIILGLNKIVRMYSPVSILDIKQGPKEPFRDYVDRFFRTLRAEQATQDVKNWMTDTLLVQNANPDCKTILRALGPGATLEEMMTACQGVGGPGHKARVLAEAMSQANNINVMMQRGNFKGAKRIVKCFNCGREGHIAKNCRAPRKKGCWKCGKEGHQMKDCTERQANFLGKIWPSHKGRPGNFLQNRPEPTAPPAEPTAPPAESFRFEETTPVPKQEQKDREALTSLKSLFGSDPLSQ

SEQ ID NO: 327 - protein, 496 aa, Artificial Sequence
  HIV Gag
MGARASILRGGKLDKWEKIRLRPGGKKKYMLKHLVWASRELERFALNSGLLETSDGCKQIIQQLQPALKTGTEELRSLYNTVATLYCVHNNIEIRDTKEALDRIEEEQKKCQQKTQQQKTQQVEAADGKVSQNYPIVQNLQGQMVHQSLSPRTLNAWVKVIEEKAFSPEIIPMFTALSEGATPQDLNTMLNTVGGHQAAMQMLKDTINEEAAEWDRLHPVHAGPVAPGQMREPRGSDIAGTTSNLQEQINWMTANPPIPVGDIYKRWIILGLNKIVRMYSPVSILDIKQGPKEPFRDYVDRFFKTLRAEQATQDVKNWMTDTLLVQNANPDCKTILRALGPGATLEEMMTACQGVGGPSHKARVLAEAMSQTNSNIMMQNSNFKGSRRIVKCFNCGKVGHIARNCRAPRKKGCWKCGKEGHQMKDCTERQANFLGRIWPSHKGRPGNFLQSRPEPTAPPAESFRFEEITPVPKQEPKDREPLTSLKSLFGSDPLSQ

SEQ ID NO: 328 - protein, 491 aa, Artificial Sequence
  HIV Gag
MGARASILRGGKLDAWERIKLRPGGKKHYMLKHLVWASRELERFALNPSLLETSEGCKQIIKQLQPALQTGTEELKSLFNTVATLYCVHEKIEIRDTKEALDKIEEEQKKSQQKTQQAKAADGKISQNYPIVQNLQGQMVHQPIAPRTLNAWVKVIEEKNFSPEVIPMFTALSEGATPQDLNSMLNAVGGHQAAMQMLKDTINEEAAEWDRLHPVHAGPIAPGQLREPRGSDIAGTTSTLQEQIAWMTNNPPVPVGDIYKRWIVLGLNKIVRMYSPVSILDIRQGPKEPFRDYVDRFFKTLRAEQATQDVKNWMTDTLLVQNANPDCKTILRAIGPGASLEEMMTACQGVGGPSHKARVLAEAMSQTHSNIMMQRSNFKGPKRIVKCFNCGKEGHIAKNCRAPRKKGCWKCGQEGHQMKDCTERQANFLGRFWPSQKGRPGNFLQSRSEPTAPPAESFRFEETTPAPKQEPKDREPLISLKSLFGSDPLSQ

SEQ ID NO: 329 - protein, 498 aa, Artificial Sequence
  HIV Gag
MGARASILRGGKLDRWEKIRLRPGGKKKYRLKHLVWASRELERFALNPSLLETADGCKQIIKQLQPALKTGTEELRSLYNTVATLYCVHRNIEVQDTKEALDKVEEEQNNCQQKTQQAEAAGGKISQNYPIVQNLQGQMVHQAISPRTLNAWVKVIGEKAFNPEIIPIFTALSEGATPRDLNTMLNTVGGHQAAMQMLKDTINEEAAEWDRLHPVHAGPVAPGQMREPRGSDIAGTTSTLQEQIAWMTSNPPVPVGDIYKRWIILGLNKIVRMYSPVSILDIKQGPKEPFRDYVDRFFKTLRAEQATQDVKNWMTDTLLVQNGNPDCKNILRALGPGATLEEMMTACQGVGGPGHKARVLAEAMSQANNINIMMQRNNFKGPKRIVKCFNCGKEGHIAKNCRAPRKKGCWKCGKEGHQMKDCTERQANFLGKIWPSNKGRPGNFLQSRPEPTAPPMPTAPPAESFRFGETTPAPKQEMKEREPLISLKSLFGSDPLSQ

SEQ ID NO: 330 - protein, 492 aa, Artificial Sequence
  HIV Gag
MGARASILRGGKLDQWEKIRLRPGGKKCYMLKHLVWASRELERFALNPGLLETSEGCKQIMEQLQPALQTGTEELKSLYNTVATLYCVHENIEVRDTKEALDKIEEEQNKSQQKTQQAKTDDGKISPNYPIVQNLQGQMVHQPLSPRTLNAWVKVIKEKAFSPEVIPMFTALSEGATPQDLNTMLNTVGGHQAAMQMLKDTINEEAAEWDRTHPVHAGPVAPGQLREPRGSDIAGTTSNLQEQIAWMTANPPVPVGDIYKRWIILGLNKIVRMYSPVSILDIKQGPKEPFRDYVDRFFKTLRAEQATQDVKNWMTDTLLVQNANPDCKTILRALGPGASIEEMMTACQGVGGPSHKARVLAEAMSQANSMNIMMQRSNFKNPKRIVKCFNCGKEGHIARNCRAPRKKGCWKCGKEGHQMKDCTERQANFLGKIWPSHKGRPGNFLQNRLEPSAPPAESFRFEETTPAPKQEPKDREPLTSLRSLFGSDPLSQ

SEQ ID NO: 331 - protein, 492 aa, Artificial Sequence
  HIV Gag
MGARASILRGGKLDAWERIRLRPGGKKCYMMKHLVWASRELEKFALNPGLLETSEGCKQIIRQLHPALQTGSEELKSLFNTVATLYCVHEKIEVRDTKEALDKIEEEQNKCQQKIQQAEAADKGKVSQNYPIVQNLQGQMVHQAISPRTLNAWVKVIEEKAFSPEVIPMFTALSEGATPQDLNTMLNTVGGHQAAMQMLKDTINEEAAEWDRVHPVHAGPIAPGQMREPRGSDIAGTTSTLQEQIAWMTSNPPIPVGDIYKRWIILGLNKIVRMYSPVSILDIKQGPKEPFRDYVDRFFKTLRAEQSTQEVKNWMTDTLLVQNANPDCKTILRALGPGASLEEMMTACQGVGGPSHKARVLGEAMSQANTNVMMQKSNFKGPRRIVKCFNCGKEGHIARNCRAPRKKGCWKCGKEGHQMKDCTERQANFLGKIWPSHKGRPGNFLQSRPEPTAPPAESFRFEETTPGQKQESKDRETLTSLKSLFGNDPLSQ

SEQ ID NO: 332 - protein, 502 aa, Artificial Sequence
  HIV Gag
MGARASILRGEKLDKWEKIRLRPGGKKHYMLKHLVWASRELEGFALNPGLLETAEGCKQIMKQLQPALQTGTEELRSLYNTVATLYCVHAGIEVRDTKEALDKIEEEQNKSQQKTQQAKEADGKVSQNYPIVQNLQGQMVHQAISPRTLNAWVKVIEEKAFSPEVIPMFTALSEGATPQDLNTMLNTVGGHQAAMQMLKDTINEEAAEWDRLHPVQAGPVAPGQMRDPRGSDIAGATSTLQEQIAWMTSNPPVPVGDIYKRWIILGLNKIVRMYSPVSILDIRQGPKEPFRDYVDRFFKTLRAEQATQDVKNWMTETLLVQNANPDCKTILRALGPGATLEEMMTACQGVGGPGHKARVLAEAMSQANSVNIMMQKSNFKGPRRNVKCFNCGKEGHIAKNCRAPRKKGCWKCGKEGHQMKDCTERQANFLGKIWPSHKGRPGNFLQNRSEPAAPTVPTAPPAESFRFEETTPAPKQEPKDREPYREPLTALRSLFGSGPLSQ

SEQ ID NO: 333 - protein, 493 aa, Artificial Sequence
  HIV Gag
MGARASILRGGNLDTWEKIRLRPGGKKHYMLKHLVWASRELERFALNPGLLETSEGCKQIMQQLQPALQTGTEELRSLFNTVATLYCVHKGIKVQDTKEALDKIEEEQNKSQQKTQQAEAAAGKVSQNYPIVQNLQGQMVHQPISPRTLNAWVKVIEEKGFSPEVIPMFTALSEGATPQDLNTMLNTVGGHQAAMQMLKDTINEEAAEWDRLHPVQAGPVAPGQMRDPRGSDIAGTTSTLQEQIGWMTHNPPIPVGDIYKRWIILGLNKIVRMYSPVSILDIKQGPKESFRDYVDRFFKTLRAEQCTQDVKNWMTDTLLVQNANPDCKTILRALGPGATLEEMMTACQGVGGPSHKARVLAEAMSQANSTSILMQRGNFKGPKRIIKCFNCGKEGHIAKNCRAPRKKGCWKCGKEGHQMKDCTERQANFLGKIWPSHKGGRPGNFLQSRPEPTAPPAESFRFEETTPALKQEPKDKEPLTSLKSPFGSDPLSQ

SEQ ID NO: 334 - protein, 490 aa, Artificial Sequence
  HIV Gag
MGARASILRGGKLDKWEKIRLRPGGKKRYMIKHLVWASRELERFALNPGLLETSEGCKQIMKQLQPALQTGTEEIRSLYNTVATLYCVHEGIEVQDTKEAVDKIEEEQNKSQQKTQQAEAADKKVSQNYPIVQNLQGQMVHQAISPRTLNAWVKVIEEKAFSPEVIPMFTALSEGATPQDLNTMLNTVGGHQAAMQMLKDTINEEAAEWDRLHPVHAGPVAPGQMREPRGSDIAGTTSTLQEQIAWMTSNPPIPVGDIYKRWIILGLNKIVRMYSPVSILDIKQGPKESFRDYVDRFFKTLRAEQSSQEVKNWMTDTLLVQNANPDCRTILKTLGPGASLEEMMTACQGVGGPSHKARILAEAMSQANNPNIMMQKNNFKGPRRIVKCFNCGKEGHIARNCKAPRKKGCWKCGKEGHQMKDCTERQANFLGKIWPSHKGRPGNFLQSRPEPTAPPAESLEETTPAPKQETKDREPLISLKSLFGSDPLSQ

SEQ ID NO: 335 - protein, 494 aa, Artificial Sequence
  HIV Gag
MGARASILRGEKLDTWEKIRLRPGGKKRYMMKHLVWASRELENFALNPALLETAEGCKQIMKQLQPALKTGTEELKSLYNTVATLYCVHEKIEVRDTKEALDKIEEEQNKCQQKEQQAEAAAKGKVSQNYPIVQNLQGQMVHQAISPRTLNAWVKVIEEKAFSPEIIPMFTALSEGATPQDLNTMLNTVGGHQAAMQMLKDTINEEAAGWDRLHPVHAGPVAPGQMREPRGSDIAGTTSNLQEQINWMTSNPPIPVGDIYKRWIILGLNKIVRMYSPVSILDIKQGPKEPFRDYVDRFFKTLRAEQATQDVKNWMTDTLLVQNANPDCKTILRALGPGASLEEMMTACQGVGGPSHKARVLAEAMSHAGNAGIMMQRGNFKGPRKIPKCFNCGKEGHIARNCRAPRKKGCWKCGKEGHQMKDCSEGQANFLGKIWPSHKGRPGNFLQSRPEPSAPPAESFRFEETTPAQKQEPKDREPPLASLKSLFGNDPLSQ

SEQ ID NO: 336 - protein, 492 aa, Artificial Sequence
  HIV Gag
MGARASISRGEKLDTWEKIRSRPGGKKCYMLKHIVWASRELERFALNPGLLETSEGCKQIMKQLQPALQTGTEELRSLFNTVATLYCVHEKIKVKDTKEALDKIEEEQNKSQEKTQQAEAAAGKISQNYPIVQNLQGQMVHQAISPRTLNAWVKVIEEKAFSPEVIPMFTALSEGATPQDLNTMLNTVGGHQAAMQMLKDTINEEAAEWDRLHPVHAGPIAPGQMREPRGSDIAGTTSTLQEQIAWMTSNPPIPVGDIYKRWIILGLNKIVRMYSPVSILDIRQGPKEPFRDYVDRFFKTLRAEQATQDVKNWMTDTLLVQNANPDCKPILRALGPGATLEEMMTACQGVGGPGHKARVLAEAMSQATSANILMQRSNFKGPKRIIKCFNCGKEGHIARNCRAPRKKGCWKCGKEGHQMKDCTERQANFLGKIWPSHKGRPGNFLQNRTEPTAPPAESFKFEETTPAPKQEPKDREPLISLKSLFGSDPLSQ

SEQ ID NO: 337 - protein, 492 aa, Artificial Sequence
  HIV Gag
MGARASILRGGKLDKWEKIRLRPGGKKRYMLKHLVWASRELERFALNPGLLETSEGCRQIMIQIQPALKTGTEELKSLYNTVAVLFCVHAGIEVQDTKEALDKIEEEQNKSQQKTQQAKEATGKVSQNYPIVQNLQGQMVHQAISPRTSNAWVKVIEEKAFSPEVIPMFTALSEGATPQDLNTMLNTVGGHQAAMQMLKDTINEEAAEWDRVHPVHAGPIAPGQMREPRGSDIAGTTSTLQEQIAWMTSNPPVPVGEIYKRWIILGLNKIVRMYSPVSILDIRQGPKEPFRDYVDRFFKTLRAEQATQDVKNWMTDTLLVQNANPDCKTILRASGPGASLEEMMTACQGVGGPGHKARVLAEAMSQANNTNIMIQRSNFKGPRRSVKCFNCGKEGHIARNCRAPRKKGCWKCGQEGHQMKDCTERQADFLGKIWPSHKGRPGNFLQSRPEPTAPPAESFRFGETTPAPKQEPKDREPLTSLRSLFGNDPLSQ

SEQ ID NO: 338 - protein, 490 aa, Artificial Sequence
  HIV Gag
  MISC_FEATURE (404)..(404): Xaa can be any amino acid
MGARASILRGGKLDTWEKIRLRPGGKKHYMLKHLVWASRELERFALNPGLLETAEGCKQIIKQLQPALQTGTEELKSLYNTVATLYCVHQGIEVRDTKEALDKIEEEQNKFQQQAKAADGKVSQNYPIVQNAQGQMVHQAISPRTLNAWVKVVEEKAFSPEVIPMFTALSEGATPQDLNTMLNTVGGHQAAMQMLKDTINEEAAEWDRLHPVHAGPIAPGQMREPRGSDIAGTTSTLQEQIAWMTNNPPIPVGDIYKRWITMGLNKIVRMYSPVSILDIKQGPKEPFRDYVDRFFKTLRAEQATQDVKNWMTDTLLVQNANPDCKTILRALGPGATLEEMMTACQGVGGPSHKARVLAEAMSHANNTSIMMQKGNFKGPRRTIKCFNCGKEGHLAKNCRAPRKXGCWKCGKEGHQMKECTERQANFLGKIWPSHKGGRPGNFLQNRPEPTAPPAESFRFEETTPAPKQEPKDREPLTSFKSLFGSDPLSQ

SEQ ID NO: 339 - protein, 500 aa, Artificial Sequence
  HIV Gag
MGARASILRRGKLDKWEKIRLRPGGKKRYMIKHLVWASRELERYALNPGLLETSEGCKQIIKQLQPTIQTGTEELKSLYNTVATLYCVHKGIDVRDTKEALDKIEEEQNKIQQKMQQAEAADKKISQDKKISQNYPIVQNLQGQMVHQAISPRTLNAWVKVIEEKAFSPEVIPMFTALSEGATPQILNTMLNTVGGHQAAMQMLKDTINEEAAEWDRLHPVHAGPVAPGQMREPRGSDIAGTTSTLQEQIAWMTSNPPIPVGDIYKRWIILGLNKIVRMYSPVSILDIKQGPKEPFRDYVDRFFKTLRAEQSSQEVKNWMTDTLLVQNANPDCKTILRALGPGASLEEMMTACQGVGGPSHKARVLAEAMSQANNIQVMMQKNNFKGPRRTIKCFNCGKEGHLARNCRAPRKKGCWKCGKEGHQMKDCTERQANFLGKIWPSHKGRPGNFLQSRPEPTAPPAEILEETTPAPKQEMKDKEPYKEPLISLRSLFGSDPLSQ

SEQ ID NO: 340 - protein, 493 aa, Artificial Sequence
  HIV Gag
MGARASILRGEKLDKWEKIRLRPGGKKHYMLKHIVWASRELEKFALNPGLLETSEGCKQIIKQLQPALQTGTEELRSLYNTVATLYCVHEKIEVRDTKEALDRIEEEQNKCQQKAQQQEEAAAKVSQNYPIVQNLQGQMVHQAISPRTLNAWVKVVQEKGFNPEVIPMFTALSEGATPQDLNTMLNTVGGHQAAMQMLKDTINEEAAEWDRMHPVHAGPVAPGQMREPRGSDIAGSTSTLQEQIAWMTSNPPVPVGDIYKRWIILGLNKIVRMYSPVSILDIKQGPKEPFRDYVDRFFKTLRAEQATQDVKNWMTDTLLVQNANPDCKTILRALGPGATLEEMMTACQGVGGPGHKARVLAEAMSQANTNIMMQRGNFKGPKRIIKCFNCGKEGHIAKNCRAPRKKGCWKCGKEGHQMKDCNNERQANFLGKIWPSHKGRPGNFLQSRPEPTAPPAERFRPEPTAPPAERQESKDREPLISLKSLFGSDPLSQ

SEQ ID NO: 341 - protein, 490 aa, Artificial Sequence
  HIV Gag
MGARASILRGEKLDTWEKIRLRPGGKKQYRIKHLVWASRELDRFALNSGLLETAEGCTQIMRQLQPALQTGTEELRSLYNTVATLYCVLKGIKVRDTKEALDKIKEEQNKSKQKTQQAKAADEKVSQNYPIVQNVQGQMVHQPISPRTLNAWVKVIEEKAFSPEVIPMFTALSEGATPQDLTTMLNTVGGRQAAMQMLKDTINEEAAEWDRLHPVHAGPVAPGQMREPRGSDIAGSTSNLQEQIAWMTSNPPIPVGDIYKRWIILGLNKIVRMYSPVSILDIKQGPKEPFRDYVDRFFKTLRAEQATQEVKGWMTDTLLIQNANPDCKTILRALGPGATLEEMMTACQGVGGPSHKARVLAEAMSHTNSIMMQRSNFKGPKRIVKCFNCGKEGHIAKNCRAPRKKGCWKCGKEGHQMKDCNERQANFLGRLWPSHKGRPGNFPQNRVEPTAPPAESLRLEETTPASKQEMKDREPLISLKSLFGNDPLSQ

SEQ ID NO: 342 - protein, 490 aa, Artificial Sequence
  HIV Gag
MGARASILRGGKLDKWEKIRLRPGGKKHYMMKHLVWASRELGRFALNPGLLETSEGCKQIMRQLQPAIQTGTEELRSLFNTVATLYCVHEGIDVKDTKEALDKVEEEQNKIQQKMQQAESADKKVSQNYPIVQNLQGQMVHQALSPRTLNAWVKVIEEKAFSPEVIPMFTALSEGATPQDLNTMLNTVGGHQAAMQMLKDTINEEAAEWDRLHPVQAGPVAPGQIREPRGSDIAGTTSTLQEQIAWMTRNPPVPVGEIYKRWIILGLNKIVRMYSPVSILDIKQGPKESFRDYVDRFFKTLRAEQATREVKNWMTDTLLVQNANPDCKTILRALGPGASLEEMMTACQGVGGPGHKARVLAEAMSQANNINIMMQKSNFKGPKRIIKCFNCGKEGHIARNCRAPRKKGCWKCGKEGHQMKDCTEKQANFLGKIWPSHKGRPGNFLQSRPEPTAPPAESLEETTPAPKQEPKDKEPLISLKSLFGSDPLSQ

SEQ ID NO: 343 - protein, 491 aa, Artificial Sequence
  HIV Gag
MGARASILRGGKLDKWEKIRLRPGGKKHYMLKHLVWASRELERFALNPGLLETSEGCQQIMKQLQPALQTGTEELRSLFNTVATLYCVHMGIEVRDTKEALDKIEEEQNKVQQKTQQAEAAAGKVSQNYPIVQNLQGQMVHQAISPRTLNAWVKVIEEKGFNPEVIPMFTALSEGATPQDLNTMLNTVGGHQAAMQMLKDTINEEAAEWDRLHPVHAGPVAPGQMRDPRGSDIAGTTSTLQEQVGWMTSNPPIPVGDIYKRWIILGLNKIVRMYSPVSILDIKQGPKEPFRDYVDRFFKCLRAEQATQEVKDWMTETLLVQNANPDCKTILRSLGTGATLEEMMTACQGVGGPSHKARVLAEAMSQANTSIMMQRGNFKGPRRIIKCFNCGKEGHIAKNCRAPRKKGCWKCGKEGHQMKDCTERQANFLGKIWPSHKGRPGNFLQSRPEPSAPPAESFRFEETTPAPKQEQKDREPLTSLKSLFGNDPLSQ

SEQ ID NO: 344 - protein, 501 aa, Artificial Sequence
  HIV Gag
MGARASILRGGKLDKWERIRLRPGGKKQYRLKHLVWASRELERFALNPGLLETAEGCKQIIQQLQPALKTGTEELRSLFNTVATLYWVHKNVEVRDTKEALDKIEEEQNKSQQKTQQAEAADKGKVSQNYPIVQNIQGQMVHQAISPRTLNAWVKVIEEKAFSPEVIPMFTALSEGATPQDLNTMLNTVGGHQAAMQMLKDTINEEAAEWDRTHPVHAGPVAPGQMREPRGSDIAGTTSTLQEQIAWMTSNPPVPVGEIYKRWIILGLNKIVRMYSPVSILDIRQGPKEPFRDYVDRFFKTLRAEQATQDVKNWMTDTLLVQNANPDCKTILRALGPGATLEEMMTACQGVGGPSHKARVLAEAMSQANSTNILIQRSHFKGSKRTVKCFNCGKEGHIARNCRAPRKKGCWKCGKEGHQMKDCTERQANFLGKIWPSHKGGRPGNFLQRRPEPTAPPAESFRFESRPEPTAPPAESFRQEPKDREPLTALKSLFGSDPLSQ

SEQ ID NO: 345 - protein, 501 aa, Artificial Sequence
  HIV Gag
MGARASILRGGKLDTWERIKLRPGGKKHYMMKHLVWASRELERFALNPSLLETSEGCRKIMKQLQPSIQTGTEELRSLYNTIATLYCVHEKIEVRDTKEALDKVEEEQKQCQQRTQQAEAADKGKVSQNYPIVQNLQGQVVHQAISPRTLNAWVKVIEEKAFSPEVIPMFTALSEGATPQDLNTMLNTVGGHQAAMQMLKDTINEEAAEWDRLHPVHAGPVAPGQMREPRGSDIAGTTSTLQEQIAWMTSNPPIPVGDIYKRWIILGLNKIVRMYSPVSILDIKQGPKEPFRDYVDRFFKTLRAEQSTQEVKNWMTDTLLVQNANPDCKTILRALGPGASLEEMMTACQGVGGPSHKARVLAEAMSQAGNANIMMQRGNFKGPRRIIKCSNCGKEGHIAKNCRAPRKKGCWKCGKEGHQMKDCTERQANFLGKIWPSHKGRPGNFIQNRPAPTAPPVEPTAPPAESFRFEETTPALKQEPKDREAPLTSLKSLFGSDPLSQ

SEQ ID NO: 346 - protein, 500 aa, Artificial Sequence
  HIV Gag
MGARASILRGGKLDTWEKIRLRPGGKKPYMLKHLVWASRELERFALNPGLLETAEGCKQILQQLQPALKTGTEELKSLYNTVATLYCVHQGIEVRDTKEALDKIEEEQNKIQQQTQKATAADKGKVSQNYPIVQNLQGQMVHQAPSPRTLNAWVKVIEEKAFSPEVIPMFTALSEGATPQDLNTMLNTVGGHQAAMQMLKDTINEEAAEWDRLHPVHAGPVAPGQMREPRGSDIAGTTSTLQEQIAWMTSNPPIPVGDIYKRWIIMGLNKIVRMYSPVSILDIRQGPKEPFRDYVDRFFKTLRAEQATQEVKNWMTDTLLVQNANPDCKTILRALGPGATLEEMMTACQGVGGPGHKARVLAEAMSQANNANIMMQRSNFKGPKRTVKCFNCGKEGHVARNCRAPRKKGCWKCGREGHQMKDCTERQANFLGRIWPSHKGRPGNFLQSRPEPTAPPAEPTAPPAESFRFEETNLAPKQEPKDREPLTSLKSLFGSDPLSQ

SEQ ID NO: 347 - protein, 488 aa, Artificial Sequence
  HIV Gag
MGARASILRGGKLDAWEKIRLRPGGKKHYMLKHLVWASRELERFALNPGLLENSEGCKQIMKQLQPALQTGTEELKSLFNTVATLYCVHEKIEVRDTKEALDKIEEEQNKSQQKTQQADGKVSQNYPIVQNLQGQMVHQAISPRTLNAWVKVIEEKAFSPEVIPMFTALSEGATPQDLNTMLNTVGGHQAAMQMLKDTINEEAAEWDRLHPVQAGPIAPGQIREPRGSDIAGTNSTLQEQIAWMTNNPPVPVGDIYKRWIILGLNKIVRMYSPVSILDIRQGPKEPFRDYVDRFFKTLRAEQATQEVKNWMTDTLLVQNANPDCKTILRALGPGASLEEMMTACQGVGGPGHKARVLAEAMSQANSNIMMQRGNFKGSKRIVKCFNCGKEGHIARNCRAPRKKGCWKCGKEGHQMKDCTERQANFLGKIWPSHKGRPGNFLQKRPEPTAPPAESFRFEETTPAPRQEAKDKEPLNSLKSLFGSDPLSQ

SEQ ID NO: 348 - protein, 504 aa, Artificial Sequence
  HIV Gag
MGARASILRGGKLDEWEKIRLRPGGKKKYRLKHLVWASRELERFALNPELLETADGCKQIIKQLQPAFQTGTEEIRSLYNSIAVLYCVHRRLTIQDTKEALDKIEEEQNKCQQKTQQEKMAEGKVSQNYPIVQNLQGQMVHQSLSPRTLNAWVKVIEEKAFSPEVIPMFTALSEGATPQDLNTMLNTVGGHQAAMQMLKDTINEEAAEWDRTHPVHAGPVAPGQMREPRGSDIAGTTSTLQEQIQWMTSNPPIPVGDIYKRWIILGLNKIVRMYSPVSILDIRQGPKEPFRDYVDRFFKTLRAEQATQDVKNWMTETLLVQNANPDCKTILRALGPGATLEEMMTACQGVGGPSHKARVLAEAMSQANNASVMMQRSNFKGPKRIIKCFNCGKEGHIAKNCRAPRKKGCWKCGKEGHQMKDCTERQVNFLGKIWPSNKGRPGNFLQNRTVPTAPPAESFRIEPTAPPAESFRFEETTPAPKQELKDREALTSLKSLFGSDPLSQ

SEQ ID NO: 349 - protein, 492 aa, Artificial Sequence
  HIV Gag
MGARASVLKGEKLDTWEKIRLRPGGRKHYMLKHLVWASRELERFALNPGLLETSEGCKQIMKQLQPALQTGTEELRSLYNTVATLYCVHERIQVRDTKEALDKIEEEQNKCQSKTQQAEAAAEKVSQNYPIVQNLQGQMVHQAISPRTLNAWVKVIEEKAFSPEVIPMFTALSEGATPQDLNTMLNTVGGHQAAMQMLKDTINEEAAEWDRLHPVHAGPVAPGQMREPRGSDIAGTTSTLQEQVTWMTSNPPVPVGDIYKRWIILGLNKIVRMYSPVSILDIRQGPKEPFRDYVDRFFKTLRAEQATQEVKNWMTDTLLVQNANPDCKTILRALGPGATLEEMMTACQGVGGPGHKARVLAEAMGQVNSTNIMMQRSNFKGPKRIIKCFNCGKEGHLARNCRAPRKKGCWKCGKEGHQMKDCTERQANFLGKIWPSHKGRPGNFFQNRTEPTAPPAESFRFEETTPAPKQEPKDREPLTSLKSLFGSDPLSQ

SEQ ID NO: 350 - protein, 497 aa, Artificial Sequence
  HIV Gag
MGARASILRGGKLGNWERIKLRPGGRKTYMLKHLVWASRELERFALNPSLLETTEGCRQIIRQLQPALQTGTEELKSLYNTVATLYCVHNNIEIRDTKEALDRIEEEQNKSQQKAQQAKAAEGKVSQNYPVVQNLQGQMVHQAISPRTLNAWVKVIEEKAFSPEVIPMFTALSEGATPQDLNTMLNTVGGHQAAMQMLKDTINEEAAEWDRIHPVHAGPVAPGQMREPRGSDIAGTTSTLQEQINWMTGNPPIPVGDIYKRWIIMGLNKIVRMYSPVSILDIKQGPKEPFRDYVDRFFKTLRAEQATQEVKNWMADTLLVQNANPDCKTILRGLGPGATLEEMMTACQGVGGPSHKARVLAEAMSQTNSNIMMQRSNFKGPRRTVKCFNCGKEGHIAKNCRAPRKKGCWKCGKEGHQMKDCTERQANFLGKIWPSNKGRPGNFLQNRPEPTAPLEPTAPPAESFRFEGATPTPKQEPRDREPLTSLKSLFGSDPLSQ

SEQ ID NO: 351 - protein, 492 aa, Artificial Sequence
  HIV Gag
  MISC_FEATURE (377)..(377): Xaa can be any amino acid
MGARASILRGEKLDRWEKIWLRPGGKNHYMLKHLVWASRELERFALNPALLETAEGCKQIIKQLHPALQTGTEELRSLYNTVATLYCVHNKIEVQDTKEALDKIEEEQNKSQQKTTQAEAADKKVSQNYPIVQNLQGQMVHQAISPRTLNAWVKVVEEKAFSPEVIPMFSALSEGATPQDLNTMLNTVGGHQAAMQMLKDTINEEAAEWDRVHPVHAGPIAPGQIREPRGSDIAGTTSTLQEQITWMTNNPPIPVGEIYKRWIILGLNKIVRMYSPVSILDIKQGPKEPFRDYVDRFFKTLRAEQSTQDVKNWMTDTLLVQNANPDCKTILRALGPGASLEEMMTACQGVGGPSHKARVLAEAMSQANNPNIMMQKXNFKGPRRIVKCFNCGKEGHIARNCRAPRKKGCWKCGKEGHQMKDCTERQANFLGKIWPSNKGRPGNFLQSRPEPTAPPAESFKFEETTPTQKQESKDREPLTSLKSLFGNDPLSQ

SEQ ID NO: 352 - protein, 499 aa, Artificial Sequence
  HIV Gag
MGARASILRGGKLDTWEKIRLRPGGKKHYMIKHLVWASRELERFALNPGLLETSEGCKQIMKQLQPALQTGTEELRSLYNTIATLYCVHESIEVRDTKEALDKIEEEQNKCQQKTQQAEAADKGKVSQNYPIVQNLQGQMVHQAISPRTLNAWVKVVEEKAFSPEVIPMFTALSEGATPQDLNTMLNTVGGHQAAMQMLKDTINEEAAEWDRTHPVHAGPIAPGQMREPRGSDIAGTTSTLQEQIAWMTSNPPVPVGEIYKRWIILGLNKIVRMYSPVSILDIKQGPKEPFRDYVDRFFKTLRAEQASQDVKNWMTDTLLVQNANPDCKTILRALGPGASIEEMMTACQGVGGPSHKARVSAEAMSQANQANIMMQKSNFKGPKRIVKCFNCGKEGHIARNCRAPRKKGCWKCGREGHQMKDCTERQANFLGKIWPSNKGRPGNFLQNRPEPTAPLEPTAPPAESFRFEETNPAPKQELKNRETLTSLRSLFGGDPLSQ

SEQ ID NO: 353 - protein, 497 aa, Artificial Sequence
  HIV-Gag
MGARASVLSGGKLEAWEKIRLRPGGKKKYRLKHLVWASRELEKFSINPSLLETETGCRRIFGQLQPALETGTEELRSLYNTIAVLYFVHQKIEVKDTKEALDKIEEEQNKCKQKTQQAAADTGSSSSQNYRGSSSQNYPIVQNAQGQMVHQAVSPRTLNAWVKVVEEKAFSPEVIPMFTALSEGATPQDLNTMLNTVGGHQAAMQMLKDTINEEAAEWDRLHPVQAGPIPPGQMREPRGSDIAGATSNLQEQIGWMTSNPPIPVGEIYKRWIILGLNKIVRMYSPVSILDIKQGPKEPFRDYVDRFFKTLRAEQATQEVKNWMTDTLLVQNANPDCKSILRALGPGATLEEMMTACQGVGGPGHKARVLAEAMSQVQNTNIMIQRGNFKGQKRIKCFNCGKEGHLARNCRAPRKKGCWKCGKEGHQMKDCTERQANFLGKIWPSNKGRPGNFPQSRTEPTAPPMEEEITSSLKQENREPSTPAISLKSLFGNDLLSQ

SEQ ID NO: 354 - protein, 496 aa, Artificial Sequence
  HIV Gag
MGARASILSGGKLDAWEKIRLRPGGKKKYRLKHLVWASRELEKFSINPGLLETPEGCRQIIRQLQPALQTGTEELKSLYNTVVVLYWVHQRVDVKDTKEALDKIEEEQNKQKTQHAAADTGNSSSQNYPIVQNAQGQMVHQAISPRTLNAWVKVVEEKAFSPEVIPMFTALSEGATPQDLNTMLNTVGGHQAAMQMLKDTINEEAAEWDRVHPVHAGPIPPGQMREPRGSDIAGTTSTLQEQIGWMTSDPPIPVGEIYKRWIILGLNKIVRMYSPVSILDIRQGPKEPFRDYVDRFFKTLRAEQATQEVKNWMTDTLLVQNANPDCRSILRALGPGASLEEMMTACQGVGGPSHKARVLAEAMSHVQSTNTNIMMQRGNFRGQKRIKCFNCGKEGHLARNCRAPRKKGCWKCGKEGHQMKDCTERQANFLGKIWPSNKGRPGNFPQSRTEPTAPPAENLRMGEEITSSLKQELETREPYNPAISLKSLFGNDPLLQ

SEQ ID NO: 355 - protein, 498 aa, Artificial Sequence
  HIV Gag
MGARASVLSGGKLDAWEKIRLRPGGKKKYRLKHLVWASRELERFAINPGLLETSEGCKQIIGQLEPSIKTGSEEIKSLFNAVVTLYCVHQRIEVRDTKEALDKLEEEQNKHKQKTQPAAADTGSSGSQNYPIVQNAQGQMTYQNLSPRTLNAWVKVVEEKAFSPEVIPMFSALSEGATPQDLNTMLNTVGGHQAAMQMLKDTINEEAAEWDRLHPVHAGPIPPGQMREPRGSDIAGTTSTLQEQIGWMTSNPPVPVGEIYKRWIILGLNKIVRMYSPVSILDIRQGPKEPFRDYVDRFFKTLRAEQATQEVKNWMTETLLVQNANPDCKSILRALGPGASLEEMMTACQGVGGPSHKARVLAEAMSQVQNTNSNIMMMQKGNFRGQKIKCFNCGKEGHLARNCRAPRKKGCWKCGKEGHQMKDCTERQANFLGKIWPSHSGRPGNFPQSRTEPTAPPAEDFGMGEETTPLQKQELKNREQHTPAISLKSLFGNDPLLQ

SEQ ID NO: 356 - protein, 238 aa, Artificial Sequence
  HIV Gag
ARASILSGGKLEAWEKIRLRPGGKKKYRLKHLVWASRELEKFSINPGLLETAAGCRQILGQLQPALQTGTEELRSLYNTVAVLYCVHQKIEVKDTKEALDKIEEEQNTCKQRTQHAAADTGSSRSQDYRGSSSQNYPIVQNAQGQMVHQAISPRTLNAWVKVVEEKAFSPEVIPMFSALSEGATPQDLNTMLNTVGGHQAAMQMLKDTINEEAAEWDRVHPVHAGPIPPGQMREPRGS

SEQ ID NO: 357 - protein, 497 aa, Artificial Sequence
  HIV Gag
  MISC_FEATURE (1)..(1): Xaa can be any amino acid
  MISC_FEATURE (23)..(23): Xaa can be any amino acid
  MISC_FEATURE (109)..(109): Xaa can be any amino acid
  MISC_FEATURE (134)..(134): Xaa can be any amino acid
  MISC_FEATURE (154)..(154): Xaa can be any amino acid
  MISC_FEATURE (210)..(211): Xaa can be any amino acid
  MISC_FEATURE (248)..(248): Xaa can be any amino acid
  MISC_FEATURE (257)..(257): Xaa can be any amino acid
  MISC_FEATURE (264)..(264): Xaa can be any amino acid
  MISC_FEATURE (304)..(304): Xaa can be any amino acid
  MISC_FEATURE (360)..(360): Xaa can be any amino acid
  MISC_FEATURE (362)..(362): Xaa can be any amino acid
  MISC_FEATURE (390)..(390): Xaa can be any amino acid
  MISC_FEATURE (408)..(408): Xaa can be any amino acid
XGARASVLSGGKLDAEKIRLRPXGKKKYRIKHLVWASRELERFALNPGLLETSEGCQQILEQLQPTLKTGSEELKSLYNTVATLYCVHQRIEIKDTKEALDKIEEIQNXSKQKTQQAATGTGSSSKVSQNYPIXQNAQGQMTHQSMSPRTLNAXVKVIEEKAFSPEVIPMFSALSEGATPQDLNMMLNIVGGHQAAMQMLKDTINEEAAXXDRLHPAQAGPFPPGQMREPRGSDIAGTTSTLQEQIGXMTSNPPIPXGDIYKRXIILGLNKIVRMYSPVSILDIRQGPKEPFRDYVDRFFKTLXAEQATQDVKNWMTETLLVQNANPDCKTILRALGSEATLEEMMTACQGVGGPGHKAXVXAEAMSQVQNANIMMQKSNFRGPKRIKCXNCGKEGHLARNCRAPRKXGCWKCGKEGHQMKDCTERQANFLGRIWPSSKGRPGNFPQSRPEPSAPPAENFRMGEEITPSLKQEQKDREQYPPSISLKSLFGNDPLSQ

SEQ ID NO: 358 - protein, 498 aa, Artificial Sequence
  HIV Gag
MGARASVLSGGKFDAWEKIRLRPGGKKKYRMKHLIWASRELDRFALNPSLLETADGCQQIMEKLQPALKTGTEEIKSLFNTVATLYCVHQRIDVKDTKEALDKIEEIKNKSKQKTQQAAADTGNSSNVSQNYPIVQNAQGQMIHQSLSPRTLNAWVKVIEEKAFSPEVIPMFSALSEGATPQDLNMMLNIVGGHQAAMQMLKDTINEEAAEWDRLHPVHAGPIPPGQMREPRGSDIAGTTSTPQEQIGWMTGNPPIPVGDIYKRWIILGLNKIVRMYSPVSILDIKQGPKEPFRDYVDRFFKTFRAEQATQDVKNWMTDTLLVQNANPDCKAILRALGPGATLEEMMTACQGVGGPGHKARVLAEAMSQVQHTNIMMQRGNFKGQKRIKCFNCGKEGHLARNCRALRKKGCWKCGKEGHQMKDCTERQANFLGKIWPSRKGRPGNFPQNRLEPTAPPAETCGMGEETVSPLKQEQKDREQAQPLVSLKSLFGNDLLSQ

SEQ ID NO: 359 - protein, 231 aa, Artificial Sequence
  HIV Gag
RASVLSGGKLDAWEKIRLRPGGKKKYRLKHLVWASRELERFALNPSLLETTEGCQQIIEQLQPALNTGTEEIKSLFNTVATLYCVHQRIDVKDTKEALDKIEEMQKKSKQKTSQATADTGSSSKVSQNYPIVQNAQGQMIHQSLSPRTLNAWVKVIEEKGFNPEVIPMFSALSEGATPQDLNMMLNIVGGHQAAMQMLKDTINEEAAEWDRLHPVHAGPIPPGQMREPRGS

SEQ ID NO: 360 - protein, 231 aa, Artificial Sequence
  HIV Gag
RASVLSGGKLDAWEKIRLRPGGKKKYRMKHLVWASRELERFALNPSLLETTEGCQQIMEQLQSALKTGTEELRSLFNTVAVLYCVHQRIEIKDTKEALDKIEEIQKKSKQKAQQAAADTGNSSKVSQNYPIVQNAQGQMVHQSLSPRTLNAWVKVIEEKAFSPEVIPVFSALSEGATPQDLNMMLNIVGGHQAAMQMLKDTINEEAAEWDRLHPAHAGPVAPGQMREPRGS

SEQ ID NO: 361 - protein, 495 aa, Artificial Sequence
  HIV Gag
MGARASVLSGGKLDAWEKIRLRPGGKKQYRLKHLVWASRELERFALNPSLLETAEGCQQIMKQLQPALKTGTEELRSLYNTVATLYCVHQRINVTDTKEALDKIEEIQNKSEQKTQQAAADTGNSKVSQNYPIVQNAQGQMVHQSLSPRTLNAWVKVIEEKAFSPEVIPMFSALSEGATPQDLNMMLNIVGGHQAAMQMLKDTINEEAAEWDRLHPVHAGPIPPGQMREPRGSDIAGTTSTPQEQIGWMTGNPPIPVGDIYKRWIILGLNKIVRMYSPVSILDIKQGPKEPFRDYVDRFFKTLRAEQASQDVKNWMTETLLIQNANPDCKSILRALGAGATLEEMMTACQGVGGPGHKARVLAEAMSQVQHPNIMMQRGNFRGQKRIKCFNCGKEGHLARNCRAPRKKGCWKCGKEGHQMKDCTERQANFLGRIWPSSKGRPGNFPQSRLEPTAPPAEIFGMREEIASPPKQEQKGQDPPLVSLKSLFGNDLLSQ

SEQ ID NO: 362 - protein, 231 aa, Artificial Sequence
  HIV Gag
RASVLSGGRLDAWEKIRLRPGGKKKYRMKHLVWASRELDRFALNPSLLETTEGCQQIIGQLQPAFKTGTEELKSLYNTVATLWCVHQRIDVKDTKEALDKLEEIQKKSKQKTQQAVADTGSSSKVSHNYPVVQNAQGQMIHQNLSPRTLNAWVKVIEEKGFNPEVIPMFSALSEGATPQDLNTMLNIVGGHQAAMQMLKDTINEEAAEWDRLHPVHAGPIPPGQMREPRGS

SEQ ID NO: 363 - protein, 231 aa, Artificial Sequence
  HIV Gag
RASKLSGEKKDAWEKMRLRPGGKKKYKLKHMVWARRELEKSALNPSLLETTEGCQQIMDKLQPALRTGTEELRSLYNTVATLYCVHQKIAVKDTKEALDKIEEIQNKNKQKTQQAAADTGNSSNVSRNYPIVQNAQGQMVHQSLSPRTLNAWVKVIEEKGFSPEVIPMFSALSEGATPGDLNMMLNIVGGHQAAMQMLKDTINEEAAEWDRLHPVHAGPIPPGQMREPRGS

SEQ ID NO: 364 - protein, 492 aa, Artificial Sequence
  HIV Gag
MGARASVLSGGKLDAWEKIRLRPGGNKKYRLKHLVWASRELEKFALNPGLLETAEGCQQIIEQLQSAPKTGTEELRSLYNTVATLYCVHQRIDVKDTKEALDKIEEIQNKSKQKKEQAAADTGNSSKVSQNYPIMQNAQGQMVHQVMSPRTLNAWVKVIEERAFSPEVIPMFSALSEGATPHDLNMMLNIVGGHQAAMEMLKDTINEEAAEWDRTHPIHAGPVAPGQMREPRGSDIAGTTSTLQEQIAWMTSNPPVPVGDIYKRWIILGLNKIVRMYSPVSILDIKQGPKEPFRDYVDRFFKALRAEQATQEVKGWMTDTLLVQNANPDCKSILRGLGAGATLEEMMTACQGVGGPSHKARVLAEAMSQAQQTNIMMQRGNFRGQKKIKCFNCGKEGHLARNCRAPRKKGCWKCGKEGHQMKDCTERQANFLGKIWPSHKGRPGNFPQSRPEPSAPPAEMMGEEIASPPKQEQNNPPSVSLKSLFGNDLLSQ

SEQ ID NO: 365 - protein, 499 aa, Artificial Sequence
  HIV Gag
MGARASVLSGGKLDAWEKIRLRPGGKKKYRLKHLVWASRELERFALNPSLLETTEGCQQIMEQLQSALRTGTEELRSLYNTVATLYCVHQRIEVKDTKEALDKIEEIQKKSKQKTQQAAADTGSSSKVSQNYPIVQNAQGQMIHQSLSPRTLNAWVKVIEEKALSPEVIPMFSALSEGATPQDLNMMLNIVGGHQAAMQMLKDTINEEAAEWDRLHPVHAGPVAPGQMREPRGSDIAGTTSTPQEQIAWMTGNPPIPVGDIYKRWMILGLNKIVRMYSPVSILDIKQGPKEPFRDYVDRFFKTLRAEQATQEVKGWMTETLLIQNANPDCKSILRALGAGATLEEMMTACQGVGGPGHKARVLAEAMSQVQHTNIMMQRGNFKGQKRIKCFNCGKEGHLAKNCRAPRKKGCWKCGREGHQMKDCTERQANFLGKIWPSSKGRPGNFPQSRPEPTAPPAAEIFGMREEIVSPPKQEQNDRDQNPPSVSLKSLFGNDLLSQ

SEQ ID NO: 366 - protein, 493 aa, Artificial Sequence
  HIV Gag
MGARASVLSGKKLDSWEKIRLRPGGNKKYRLKHLVWASRELEKFTLNPGLLETAEGCQQILGQLQPALQTGTEELRSLYNTVAVLYCVHQRIDVKDTKEALNKIEEMQNKNKQRTQQAAANTGSSQNYPIVQNAQGQPVHQALSPRTLNAWVKVVEDKAFSPEVIPMFSALSEGATPQDLNMMLNVVGGHQAAMQMLKDTINEEAAEWDRLHPVHAGPIPPGQMREPRGSDIAGTTSTVQEQIGWMTGNPPIPVGDIYRRWIILGLNKIVRMYSPVSILDIRQGPKEPFRDYVDRFFKTLRAEQATQDVKNWMTETLLVQNANPDCKSILRALGPGATLEEMMTACQGVGGPGHKARVLAEAMSQVQQTSIMMQRGNFRGPRRIKCFNCGKEGHLAKNCRAPRKKGCWKCGKEGHQMKDCTERQANFLGKIWPSNKGRPGNFPQSRPEPTAPPAEIFGMGEKMTSPAKQELKDREQTPLVSLKSLFGNDPLSQ

SEQ ID NO: 367 - protein, 491 aa, Artificial Sequence
  HIV Gag
MGARASILRGGKLDKWEKIRLRPGGKKHYMIKHLVWASRELERFALNPGLLETSEGCKQIIKQLQPALQTGTEELRSLHNTVATLYCVHAGIEIRDTKEALDKIEEEQEKSQQKTQQAKEADGKVSQNYPIVQNLQGQMVHQALSPRTLNAWVKVIEEKAFSPEIIPMFTALSEGATPQDLNTMLNTVGGHQAAMQMLKDTINEEAAEWDRLHPAQAGPIAPGQMREPRGSDIAGTTSTLQEQIAWMTGNPPVPVGEIYKRWIILGLNKIVRMYSPVSILDIKQGPKEPFRDYVDRFFKTLRAEQATQDVKNWMTDTLLVQNANPDCKTILRALGPGASLEEMMTACQGVGGPSHKARVLAEAMSQTNNSILMQRSNFKGFKRTVKCFNCGKEGHIARNCRAPRKKGCWKCGKEGHQMKDCTERQANFLGKIWPSHKGRPGNFLQNRPEPTAPPAESFRFEETTPALKQEQKDREPLTSLKSLFGSDPLSQ

SEQ ID NO: 368 - protein, 494 aa, Artificial Sequence
  HIV Gag
MGARASILRGGKLDAWEKIKLKPGGKKTYMMKHLVWASRELERFALNPDLLETPEGCKQIMRQLQPALQTGTDELRSLYNTVATLYCVHQKIDVKDTKEALDKIEEEQNKSQQKTQQAEAADKGKVSQNYPIVQNAQGQMVHQAISPRTLNAWVKVIEEKAFSQEVIPMFTALSEGATPQDLNTMLNTVGGHQAAMQMLKDTINEEAAEWDRVHPVQAGPVAPGQIREPRGSDIAGTTSTLQEQIAWMTNNPPIPVGEIYKRWIILGLNKIVRMYSPVSILDIKQGPKEPFRDYVDRFFKTLRAEQASQDVKNWMTDTLLVQNANPDCKTILRALGPGASLEEMMTACQGVGGPGHKARVLAEAMSQVQQPNIMMQRGNFKGQRRIIKCFNCGKEGHLARNCRAPRKKGCWKCGKEGHQMKDCTERQANFLGKIWPSNKGRPGNFPQSRLEPTAPPAENFGMGEEIASPLKQEQKDREPLISLKSLFGNDPLSQ

SEQ ID NO: 369 - protein, 231 aa, Artificial Sequence
  HIV Gag
RASVLSGGKLDAWEKIRLRPGGKKKYRMKHLVWASRELDRFALNPSLLETSEGCQQILEQLQPALKTGTEEIKSLFNTVATLYCVHQRIEVKDTKEALDKIEEIKNKSKQKAQQAAADTGNSGKVSQNYPIVQNPQGQMVHQPISPRTLNAWVKVIEDKAFSPEVIPMFTALSEGATPQDLNTMLNTVGGHQAAMQMLKDTINEEAAEWDRLHPAQAGPVAPGQMREPRGS

SEQ ID NO: 370 - protein, 496 aa, Artificial Sequence
  HIV Gag
MGARASILSGGKLDAWEKIRLRPGGKKKYRLKHLVWASRELDRFALNPSLLETTEGCQQIMDQLQPALKTGTEELRSLYNTVATLWCVHKRIDVKDTKEALDKIEEIQKKSKQKAQQAAADTGNSSNVSQNYPIVQNAQGQMVHQSLSPRTLNAWVKVIEEKAFSPEVIPMFSALSEGATPQDLNMMLNIVGGHQAAMQMLKDTINEEAAEWDRIHPVHAGLIAPGQMREPRGSDIAGTTSTLQEQIAWMTSNPPIPVGDIYKRWIILGLNKIVRMYSPVSILDIRQGPKEPFRDYVDRFFKTLRAEQATQEVKNWMTETLLVQNANPDCKTILKALGPGATLEEMMTACQGVGGPGHKARVLAEAMSQANANTAIMMQRGNFKGPKKIIKCFNCGKEGHIAKNCRAPRKKGCWKCGREGHQMKDCTERQANFLGKIWPSHKGRPGNFLQSRPEPTAPPAESFGFGEEITPSQKQEQKDKELYPLASLKSLFGNDP

SEQ ID NO: 371 - protein, 500 aa, Artificial Sequence
  HIV Gag
MGARASVLTGGKLDTWERIRLRPAGKKKYRMKLLVWASRELERFAINPGLLETAEGCQQIIEQLQSTLKTGSEELKSLFNTVATLWCVHLRIEIKDTKEALDKLEEVQNKSKQRTQQAAAATGSGSQNFPIVQNAQEQMVHQSMSPRTLNAWVKVIEEKAFSPEVIPMFSALSEGATPQDLNMMLNIVGGHQAAMQMLKDTINEEAADWDRTHPVHAGPNPPGQMREPRGSDIAGTTSTLQEQIGWMTSNPPIPVGEIYKRWIILGLNKIVRMYSPVSILDIRQGPKEPFRDYVDRFFKTLRAEQATQDVKNWMTDTLLVQNANPDCRTILRALGPGASLEEMMTACQGVGGPSHKARVLAEAMSQANNTVMMQRGNFKGPKRIIKCFNCGKEGHVARNCRAPRKKGCWKCGKEGHQMKDCTTERQANFLGKIWPSNKGRPGNFPQSRPEPTAPPAEPTAPPAESFGKEDAIDSSPKQEPRDKGLYPPLTSLKSLFGNDP

SEQ ID NO: 372 - protein, 498 aa, Artificial Sequence
  HIV Gag
MGARASVLSGERLDEWEKIQLRPGGKKRYRLKHIVWASRELERFALNPGLLETPEGCKQIMGQLQPAIQTGSEELKSLFNTVATLYCVHAKIKVTDTKEALDKIEEEQTKSKKKAQQATADTKNSSQVSQNYPIVQNLQGQMVHQAISPRTLNAWVKVIEEKAFSPEVIPMFSALSEGAAPQDLNTMLSTVGGHQAAMQILKETINEEAADWDRLHPVHAGPNAPGQMREPRGSDIAGTTSTLQEQIGWMTSNPPIPVGEIYKRWIILGLNKIVRMYSPVSILDIRQGPKEPFRDYVDRFYKTLRAEQASRDVKNWMTETLLVQNANPDCKTILKALGPAATLEEMMTACQGVGGPGHKARVLAEAMSQATNNINAAIMMQRGNFKGQRKIIKCFNCGKLGHIARNCKAPRKKGCWKCGKEGHQMKDCTERQANFLGKIWPSSKGRPGNFLQSRPEPTAPPAESFGFGEEIAPSQKQEQKDKELYPLASLKSLFGNDP

SEQ ID NO: 373 - protein, 231 aa, Artificial Sequence
  HIV Gag
RASVLSGGKLDAWEKIRLRPGGRKKYKLKHIVWASRELERFALNPSLLETTKGCQQIMEQLQPAFKTGTEELKSLYNTVATLYCVHQQIEVKDTKEALDKIEEMQNRSKQKTQQAAADTGNNSKVSQNYPIVQNAQGQMIHQALSPRTLNAWVKVIEEKAFSPEVIPMFSALSEGATPQDLNMMLNIVGGHQAAMQMLKDTINEEAAEWDRLHPVHAGPIPPGQMREPRGS

SEQ ID NO: 374 - protein, 498 aa, Artificial Sequence
  HIV Gag
MGARASILSGGKLDKWEKIRLRPGGKKQYRLKHLVWASRELDRFALNPSLLETSEGCQQVMEQLQPALKTGSEELKSLFNLVAVLWCVHQRIDVRDTKEALDKIEEIQNKSKQKTQQAAAATGNGSNISQNYPIVQNAQGQMVHQAISPRTLNAWVKAIEEKAFSPEVIPMFSALSDGATPQDLNMMLNIVGGHQAAMQMLKDTINEEAADWDRLHPVHAGPIPPGQMREPRGSDIAGTTSTLQEQIGWMTSNPPIPVGEIYKRWIILGLNKIVRMYSPVSILDIRQGPKEPFRDYVDRFFKTLRAEQATQEVKNWMTDTLLVQNANPDCKTILKALGPGATLEEMMTACQGVGGPGHKARVLAEAMSQVQNVSVMMQRGNFKGQKRIKCFNCGKEGHLARNCRAPRKKGCWKCGKEGHQMKDCTERQANFLGKIWPSSKGRPGNFPQSRPEPSAPPAESFGIGEEITSYQKQEQKDREPPPPLVSLKSLFGNDPLSQ

SEQ ID NO: 375 - protein, 505 aa, Artificial Sequence
  HIV Gag
MGARASVLSGGKLDAWEKIRLRPGGKKKYRLKHLVWASRELERFALNPGLLETGEGCQQIMEQLQSTLKTGSEEIKSLYNTVATLYCVHQRIDVKDTKEALDKIEEIQNKSRQKTQQAAAAQQAAAATKNSSSVSQNYPIVQNAQGQMIHQAISPRTLNAWVKVIEEKAFSPEVIPMFSALSEGATPQDLNMMLNIVGGHQAAMQMLKDTINEEAADWDRVHPVHAGPIPPGQMREPRGSDIAGTTSTLQEQIGWMTSNPPIPVGDIYKRWIILGLNKIVRMYSPVSILDIRQGPKEPFRDYVDRFFKTLRAEQATQEVKNWMTETLLVQNANPDCKTILKALGPGATLEEMMTACQGVGGPSHKARVLAEAMSQATNSTAAIMMQRGNFKGQKRIKCFNCGKEGHLARNCRAPRKKGCWKCGKEGHQMKDCTERQANFLGKIWPSHKGRPGNFLQSRPEPTAPPAESFGFGEEIKPSQKQEQKDKELYPLASLKSLFGNDQLSQ

SEQ ID NO: 376 - protein, 493 aa, Artificial Sequence
  HIV Gag
MGARASVLSGGKLDAWEKIRLRPGGKKKYRMKHLVWASRELERFAINPGLLETAEGCQQIIEQLQSTLRTGSEELKSLYNTLATLWCVHKKIEVRDTKEAVDKIEEMQNKSKQKTQQAAAADTGSSSQNYPIVQNAQGQMVHQSMSPRTLNAWVKVIEEKGFSPEVIPMFSALSEGATPQDLNMMLNIVGGHQAAMQMLKDTINEEAAEWDRVHPVHAGPIPPGQMREPRGSDIAGSTSTLQEQVGWMTSNPPVPVGDIYKRWIILGLNKIVRMYSPVSILDIRQGPKEPFRDYVDRFFKTLRAEQATQEVKNWMTETLLVQNANPDCKSILKALGTGATLEEMVTACQGVGGPGHKARVLAEAMSQVHQTNIMMQRGNFRGQKTIKCFNCGKEGHLARNCRAPRKKGCWKCGKEGHQMKDCTERQANFLGKIWPSSKGRPGNFPQSRLEPTAPPAESLGMEEEITPSQKQEPRDTGLYPPLTSLKSLFGNDP

SEQ ID NO: 377 - protein, 497 aa, Artificial Sequence
  HIV Gag
MGARASVLSGGKLDAWEKIRLRPGGKKKYRMKHLVWASRELERFALNPDLLETTEGCQQIMRQLQPSLQTGTEEIKSLFNTVATLYCVHQRIEVKDTKEALEEVEKIQKNSQQETQKAAMGKGNSSQVSQNYPIVQNAQGQVVHQPISPRTLNAWVKVIEEKNFSPEVIPMFTALSEGATPQDLNTMLNTVGGHQAAMQMLKDSINEEAAEWDRLHPQQAGPIPPGQIREPRGSDIAGTTSTLQEQITWMTSNPPIPVGEIYKRWIILGLNKIVRMYSPVSILDIKQGPKEPFRDYVDRFFKTLRAEQATQEVKNWMTDTLLVQNANPDCKTILRALGAGATLEEMLTACQGVGGPSHKARVLAEAMSRATGTSAAIMMQKNNFKGPRRGIKCFNCGKEGHLARNCRAPRKKGCWKCGKEGHQMKDCTERQANFLGKIWPSNKGRPGNFLQNRPEPTAPPAESFGFGEEIAPSLKQEPREKESPPLTSLKSLFGNDP

SEQ ID NO: 378 - protein, 494 aa, Artificial Sequence
  HIV Gag
MGARASILSGGKLDAWEKIRLRPGGKKKYQIKHIVWASRELERFALNPGLLETAEGCQQIMEQLQSALKTGSEELKSLFNTVATLYCVHQKIDVKDTKEALDKIEEIQNKSKQKTQQAAAATGNSSKVSQNYPIVQNAQGQMVHQAMSPRTLNAWVKVIEEKGFSPEVIPMFSALSEGATPQDLNMMLNIVGGHQAAMQMLKDTINEEAAEWDRIHPVQAGPIPPGQIREPRGSDIAGTTSTTQEQIGWMTGNPPIPVGEIYKRWIILGLNKIVRMYSPVSILDIRQGPKEPFREYVDRFFKTLRAEQATQEVKNWMTETLLVQNANPDCKTILRGLGAGATLEEMMTACQGVGGPGHKARVLAEAMSQVHNTSIMMQRGNFKGQKRIKCFNCGKEGHLARNCRAPRKKGCWKCGKEGHQMKDCTERQANFLGKIWPSNKGRPGNFLQNRPEPTAPPAESFGFGEEIAPSPRPEPREKERYPLTSLKSLFGSDP

SEQ ID NO: 379 - protein, 498 aa, Artificial Sequence
  HIV Gag
MGARASVLSGGKLDKWEKIRLRPGGKKQYKLKHIVWASRELERFALNPGLLETTEGCQQILSQFQPALKTGTEEIISLYNTVATLYCVHQNIEVKDTKEALDEVEKAQKSSQQKTQKATMAEENSSNQVSKNFPIVQNAQGQMVHQALTPRTLNAWVKVVEEKNFSPEVIPMFSALSEGATPQDLNTMLNTVGGHQAAMQMLKDTINEEAAEWDRVHPPQAGPIPPGQIREPRGSDIAGTTSTLQEQIRWMTSNPPIPVGEIYKRWIILGLNKIVRMYSPVSILDIKQGPKEPFRDYVDRFFKTLRAEQATQEVKGWMTDTLLVQNANPDCKTILRALGPGATLEEMMTACQGVGGPSHKARVLAEAMSQASSTAAAIMMQKSNFKGPRKTIKCFNCGKEGHLARNCRAPRKKGCWKCGKEGHQMKDCERQANFLGKIWPSNKGRPGNFLQNRPEPTAPPAESFETKEEITSSPKQEPRDKELYPPLASLKSLFGSDP

SEQ ID NO: 380 - protein, 493 aa, Artificial Sequence
  HIV Gag
MGARASVLSGGKLDAWEKIRLRPGGKKQYRMKHLVWASRELERFALNPGLLETAEGCQQIMEQLQSALKTGSEELRSLYNTVATLYCVHQRIEVKDTKEALDKIEEIQNKSKQKAQQAAAATGNSSSVSQNYPIVQNAQGQMVHQAVSPRTLNAWVKVIEEKAFSPEVIPMFSALSEGATPQDLNMMLNIVGGHQAAMQMLKDTINEEAAEWDRLHPVHAGPIPPGQMREPRGSDIAGTTSTLQEQIGWMTSNPPIPVGDIYKRWIILGLNKIVRMYSPVSILDIRQGPKEPFRDYVDRFFKTLRAEQASQDVKNWMTETLLVQNANPDCKTILKALGAGATLEEMMTACQGVGPGHKAKILAEAMSQVQNTNIMMQRSNFKGQKRIKCFNCGKEGHLARNCRAPRKKGCWKCGKEGHQMKDCTERQANFLGKIWPSNKGRPGNFLQSRPEPTAPPAESFGFGEETAPSPKQEGKDKELYPLTSLKSLFGSDP

SEQ ID NO: 381 - protein, 506 aa, Artificial Sequence
  HIV Gag
MGARASVLSGGELDRWEKIRLRPGGKKTYKLKHIVWASRELERFAVNPGLLETSEGCRQILVQLQPSLPTGSEELKSLFNTVATLYCVHQKIEIRDTKEALEKIEEEQNKSKKKAQQAAADAAAADAGNSSKVSQNYPIVQNLQGQMVHQPISPRTLNAWVKVVEEKAFSPEVIPMFSALSEGATPQDLNTMLNTVGGHQAAAMQMLKETINEEAADWDRLHPVHAGPIAPGQMREPRGSDIAGTTSTLQEQIGWMTNNPPIPVGEIYKRWIILGLNKIVRMYSPTSILDIKQGPKEPFRDYVDRFYRTLRAEQASQEVKNWMTETLLVQNANPDCRTILKALGPAATLEEMMTACQGVGGPGHKARVLAEAMSQVTNSATIMMQRGNFRNQRKTVKCFNCGKEGHIARNCRAPRKRGCWKCGKEGHQMKDCTERQANFLGKIWPSHKGRPGNFLQSRPEPTAPPEESFRFGEETTTPSQKQEPIDKELYPLASLRSLFGNDPSSQ

SEQ ID NO: 382 - protein, 505 aa, Artificial Sequence
  HIV Gag
MGARASVLSGGQLDRWEKIRLRPGGKKKYRLKHLVWASRELERFAVNPGLLETSEGCRQILEQLQPALQTGSEELRSLFNTVATLYCVHLRIEIKDTKEALEKIEEEQNKSKKKAQQTAAGTGNNSQASQNYPIVQNLQGQMVHQPISPRTLNAWVKVVEEKAFSPEVIPMFSALSEGATPQDLNTMLNTVGGHQAAMQMLKETINEEAAEWDRLHPVHAGPVAPGQMREPRGSDIAGTTSTLQEQIGWMTNNPPIPVGEIYKRWIILGLNKIVRMYSPTCILDIRQGPKEPFRDYVDRFYKTLRAEQASQDVKNWMTETLLVQNANPDCKTILKALGPAATLEEMMTACQGVGGPSHKARILAEAMSQVTNSAITNSATIMMQRGNFRNQRKIVKCFNCGKEGHIAKNCRAPRKKGCWKCGKEGHLMKDCTERQANFLGKIWPSHKGRPGNFLQSRPEPTAPPEESFRFGEETTTPSQKQEPIDKELYPLASLKSLFGNDPSSQ

SEQ ID NO: 383 - protein, 500 aa, Artificial Sequence
  HIV Gag
MGARASVLSGGELDRWEKIRLRPGGKKKYRLKHIVWASRELERFAVNPGLLETSEGCRQILGQLQPSLQTGSEELRSLFNTVATLYCVHQRIEVKDTKEALDKIEEEQNKSKKKAQPAARDAGNNSQVSQNYPIVQNLQGQMVHQPISPRTLNAWVKVVEEKAFSPEVIPMFSALSEGATPQDLNTMLNTVGGHQAAMQMLKETINEEAAEWDRLHPVHAGPIAPGQMREPRGSDIAGTTSTLQEQIGWMTNNPPIPVGEIYKRWIILGLNKIVRMYSPTSILDIRQGPKEPFRDYVDRFYKTLRAEQATQEVKNWMTETLLVQNANPDCKTILKALGPAATLEEMMTACQGVGGPGHKARVLAEAMSQVTNSATVMMQRGNFRNQRKTVKCFNCGKEGHIAKNCRAPRRKGCWKCGKEGHQMKDCTERQANFLGKIWPSYKGRPGNFLQRRPEPTAPPEESFRFGEETATPFQKQEPIDKELYPLASLRSLFGNDPSSQ

SEQ ID NO: 384 - protein, 499 aa, Artificial Sequence
  HIV Gag
MGARASVLSGGELDKWEKIRLRPGGKKKYQLKHIVWASRELERFAVNPGLLETSEGCRQIMGQLQPSLQTGSEELRSLYNTVATLYCVHQKIEVKDTKEALDKVEEEQNNSKKKAQQEAADAGNRNQVSQNYPIVQNLQGQMVHQAISPRTLNAWVKVVEEKAFSPEVIPMFSALSEGATPQDLNTMLNTVGGHQAAMQMLKETINEEAAEWDRLHPVHAGPIAPGQMREPRGSDIAGTTSTLQEQIGWMTNNPPIPVGEIYKRWIILGLNKIVRMYSPTSILDIKQGPKEPFRDYVDRFYKTLRAEQATQEVKNWMTETLLVQNANPDCKTILKALGPAATLEEMMTACQGVGGPGHKARVLAEAMSQVTGSAAIMMQRGNFRNQRKTVKCFNCGKEGHIARNCRAPRKKGCWKCGKEGHQMKDCTERQANFLGKIWPSHKGRPGNFLQSRPEPTAPPEESFRFGEATAPSQKQEPIDKELYPLASLKSLFGSDPSSQ

SEQ ID NO: 385 - protein, 500 aa, Artificial Sequence
  HIV Gag
MGARASVLSGGELDRWEKIRLRPGGKKKYKLKHIVWASRELERFAVNPGLLETSEGCRQILGQLQPSLQTGSEELRSLYNTVATLYCVHQRIEIKDTKEALDKIEEEQNKSKKKAQQAAADTGHSNQVSQNYPIVQNIQGQMVHQAISPRTLNAWVKVVEEKAFSPEVIPMFSALSEGATPQDLNTMLNTVGGHQAAMQMLKETINEEAAEWDRVHPVHAGPIAPGQMREPRGSDIAGTTSTLQEQIGWMTNNPPIPVGEIYKRWIILGLNKIVRMYSPTSILDIRQGPKEPFRDYVDRFYKTLRAEQASQEVKNWMTETLLVQNANPDCKTILKALGPAATLEEMMTACQGVGGPGHKARVLAEAMSQVTNSATIMMQRGNFRNQRKIVKCFNCGKEGHTARNCRAPRKKGCWKCGKEGHQMKDCTERQANFLGKIWPSYKGRPGNFLQSRPEPTAPPEESFRSGVETTTPPQKQEPIDKELYPLTSLRSLFGNDPSSQ

SEQ ID NO: 386 - protein, 499 aa, Artificial Sequence
  HIV Gag
MGARASVLSGGELDKWEKIRLRPGGKKKYQLKHIVWASRELERFAINPGLLETSEGCRQILGQLQPSLKTGSEEIRSLYNTVATLYCVHQKIEVKDTKEALDKIEEEQNKSKKKAQQTAADTGNSSQVSQNYPIVQNLQGQMVHQPISPRTLNAWVKVVEEKAFSPEVIPMFSALAEGATPQDLNTMLNTVGGHQAAMQMLKETINEEAAEWDRLHPVHAGPIAPGQMREPRGSDIAGTTSTLQEQIGWMTNNPPIPVGEIYKRWIILGLNKIVRMYSPTSILDIRQGPKEPFRDYVDRFYKTLRAEQASQDVKNWMTETLLVQNANPDCKTILKALGPAATLEEMMTACQGVGGPGHKARVLAEAMSQVNSVTVMMQKGNFKNQRKTVKCFNCGKEGHIAKNCRAPRKKGCWKCGREGHQMKDCTERQANFLGKIWPSHKGRPGNFLQNRPEPTAPPAESFGFGEETTTPPQKQEPIDKGLYPLTSLRSLFGNDPSSQ

SEQ ID NO: 387 - protein, 500 aa, Artificial Sequence
  HIV Gag
MGARASVLSGGELDKWEKIRLRPGGKKKYKLKHIVWASRELERFAVNPGLLETSEGCRQILGQLQPSLQTGSEELRSLYNTVATLYCVHQKIDVKDTKEALEKIEEEQNKSKKKAQQAAAGTGNSSQVSQNYPIVQNLQGQMVHQAISPRTLNAWVKVVEEKAFSPEVIPMFSALSEGATPQDLNTMLNTVGGHQAAMQMLKETINEEAAEWDRLHPVHAGPIAPGQMREPRGSDIAGTTSTLQEQIGWMTNNPPIPVGEIYKRWIILGLNKIVRMYSPTSILDIRQGPKEPFRDYVDRFYKTLRAEQASQEVKNWMTETLLVQNANPDCKTILKALGPAATLEEMMTACQGVGGPGHKARVLAEAMSQVTNSATIMMQRGNFRNQRKTVKCFNCGKVGHIAKNCRAPRKKGCWKCGKEGHQMKDCNERQANFLGKIWPSHKGRPGNFLQSRPEPTAPPEESFRFGEEKTTPSQKQEPIDKELYPLASLRSLFGNDPSSQ

SEQ ID NO: 388 - protein, 507 aa, Artificial Sequence
  HIV Gag
MGARASVLSGGELDRWEKIRLRPGGKKKYRLKHVVWASRELERFAVNPGLLETSEGCRQILEQLQPSLQTGSEERRSLFNTVATLYCVHQRIDVKDTKEALDKIEEEQSKSKKKAQQAAADKGNSNSNQVSQNYPIVQNLQGQMVHQAISPRTLNAWVKVVEEKAFSPEVIPMFSALAEGATPQDLNTMLNTVGGHQAAMQMLKETINEEAAEWDRVHPVHAGPVAPGQMREPRGSDIAGTTSTLQEQIGWMTNNPPIPVGEIYKRWIILGLNKIVRMYSPVSILDIRQGPKEPFRDYVDRFYKTLRAEQASQDVKNWMTETLLVQNANPDCKTILKALGPAATLEEMMTACQGVGGPGHKARVLAEAMSQVNSATIMMQKGNFRSQRKTVKCFNCGKEGHIARNCRAPRKKGCWKCGKEGHQMKECTERQANFLGKIWPSHKGRPGNFLQSRPEPIAPPEPTAPPEESFRFGGETTTPSQKQEPINKEPYPLASLRSLFGNDPSSQ

SEQ ID NO: 389 - protein, 500 aa, Artificial Sequence
  HIV Gag
MGARASVLSGGKLDRWEKIRLRPGGKKKYKLKHIVWASRELERFTVNLGLLETSEGCRQILVQLQPSLQTGSEELKSLYNTVAVLYCVHQGIEVKDTKEALDKIEEEQNKSKKKAQPAAADTGNSSQVSHNYPIVQNLQGQMVHQSISPRTLNAWVKVVEEKAFSPEVIPMFSALSEGAIPQDLNTMLNTVGGHQAAMQMLKETINEEAAEWDRLHPVHAGPVAPGQMREPRGSDIAGTTSTLQEQIGWMTNNPPIPVGEIYKRWIILGLNKIVRMYSPTSILDIRQGPKEPFRDYVDRFYKTLRAEQASQEVKNWMTETLLVQNANPDCKTILKALGPAATLEEMMTACQGVGGPSHKARILAEAMSQVTNSATIMMQRGNFRNQRKTVKCFNCGKEGHIAKNCRAPRRKGCWKCGKEGHQMKDCTERQANFLGKIWPSHKGRPGNFLQSRPEPTAPPEESFRFGEETTTPAQKQEPIDKELYPLASLRPLFGNDPSSQ

SEQ ID NO: 390 - protein, 500 aa, Artificial Sequence
  HIV Gag
MGARASILSGGELDQWEKIRLRPGGKKKYRLKHLVWASRELERFAVNPGLLETSEGCRQILGQLQPSLQTGSEELKSLFNAVAVLYCVHQRIEIKDTKEALEKIEEEQSKSKKKAQQATADTGSSSQVSQNYPIVQNLQGQMVHQPISPRTLNARVKVIEEKAFSPEVIPMFSALSEGATPQDLNTMLNTVGGHQAAMQMLKETINEEAADWDRLHPVHAGPIAPGQMREPRGSDIAGTTSTLQEQIGWMTNNPPIPVGEIYKRWIILGLNKIVRMYSPASILDIRQGPKEPFRDYVDRFYKTLRAEQASQEVKNWMTETLLVQNANPDCKTILKALGPGATLEEMMTACQGVGGPSHKARVLAEAMSQATNSATIMMQRGNFRNQRRTVKCFNCGKEGHIAKNCRAPRKKGCWKCGKEGHQMKDCTERQANFLGKIWPSHKGRPGNFLQSRPEPSAPPEESFRFGEETTTPSQKQEPIDKELYPLASLRSLFGNDPSSQ

SEQ ID NO: 391 - protein, 500 aa, Artificial Sequence
  HIV Gag
MGARASVLSGGELDKWEKIRLRPGGKKRYKLKHIVWASRELERFAVNPGLLETAEGCRQILGQLQPALQTGSEELRSLFNTVAVLYCVHQRIEVKDTKEALDKIEEEQNKSKKKAQQAAADTGNSSQVSQNYPIVQNLQGQMVHQALSPRTLNAWVKVVEEKAFSPEVIPMFSALSEGATPQDLNTMLNTVGGHQAAMQMLKETINEEAAEWDRLHPVHAGPIAPGQMREPRGSDIAGTTSTLQEQIGWMTHNPPIPVGEIYKRWIILGLNKIVRMYSPTSILDIRQGPKESFRDYVDRFYKTLRAEQASQEVKNWMTETLLVQNANPDCKTILKALGPGATLEEMMTACQGVGGPGHKARVLAEAMSQVTNSATIMMQRGNFRNQRKIVKCFNCGKEGHIARNCRAPRKKGCWKCGKEGHQMKDCTERQANFLGKIWPSHKGRPGNFLQSRPEPTAPPEESFRFGEETTTPSQKQEPRDKELYPLASLRSLFGNDPSSQ

SEQ ID NO: 392 - protein, 500 aa, Artificial Sequence
  HIV Gag
MGARASILSAGELDKWERVRLRPGGKKKYRLKHLVWASRELERFAVNPGLLETSEGCRQILGQLQSSLQTGSEELRSLYNTVATLYCIHQKIEIKDTKDALEKIEEEQNKSKKKAQQAATGTGNNSPVSQNYPIVQNLQGQMVHQAISPRTLNAWVKVVEEKAFSPEVIPMFSALSEGATPQDLNTMLNTVGGHQAAMQMLKETINEEAAEWDRLHPVHAGPIAPGQMREPRGSDIAGTTSTLQEQIGWMTNNPPIPVGEIYKRWIILGLNKIVRMYSPTSILDIRQGPKEPFRDYVDRFYKTLRTEQASQDVKNWMTETLLVQNANPDCKTILKALGPAATLEEMMTACQGVGGPSHKARVLAEAMSRVPNSTNIMMQRGNYRNQRKTVKCFNCGKEGHIARNCRAPRKKGCWKCGKEGHQMKDCTERQANFLGKIWPSHKERPGNFLQSRPEPTAPPEESFRFGEQTTTPSQKQEPIDKDLYPLASLESLFGNDPSSQ

SEQ ID NO: 393 - protein, 500 aa, Artificial Sequence
  HIV Gag
MGARASVLSGGKLDKWEKIRLRPGGKKKYKLKHLVWASRELERFAVNPGLLETAEGCRQILGQLQPSLQTGSEELKSLYNTIAVLYCVHQMIDVKDTKEALEKIEEEQNNSKKKAQQAAADTGNSSQVSRNYPIVQNIQGQMVHQAISPRTLNAWVKVVEEKAFSPEVIPMFSALSEGATPQDLNTMLNTVGGHQAAMQMLKETINEEAAEWDRLHPVQAGPVAPGQMREPRGSDIAGTTSTLQEQIGWMTNNPPIPVGEIYKRWIILGLNKIVRMYSPSSILDIRQGPKESFRDYVDRFYKTLRAEQASQEVKNWMTETLLVQNANPDCKTILKALGPGATLEEMMTACQGVGGPGHKARVLAEAMSQVTNSATIMMQRGNFRNQRKTVKCFNCGKEGHIARNCKAPRKRGCWKCGKEGHQMKDCTERQANFLGKIWPSHKGRPGNFPQSRLEPTAPPEESFRFGEETTTPPQKQEREDKEMYPLASLRSLFGNDPSSQ

SEQ ID NO: 394 - protein, 495 aa, Artificial Sequence
  HIV Gag
MGARASVLSGGKLDSWEKIRLRPGGKKKYKLKHIVWASRELERFAVNPGLLETSEGCRQILGQLQPSLQTGSEELRSLYNTVATLYCVHERIEVKDTKEALDKVEEEQNKSKKKAQQAAADTGNSSQVSQNYPIVQNIQGQMVHQALSPRTLNAWVKVVEEKAFSPEVIPMFSALSEGATPQDLNTMLNTVGGHQAAMQMLKETINEEAAEWDRLHPVHAGPIAPGQMREPRGSDIAGTTSTLQEQIGWMTNNPPIPVGEIYKRWIIMGLNKIVRMYSPTSILDIRQGPKEPFRDYVDRFYKTLRAEQASQEVKNWMTETLLVQNSNPDCKTILKALGPGATLEEMMTACQGVGGPGHKARVLAEAMSQITNTSATIMMQGGNFRNQRKIKCFNCGKEGHISKNCRAPRKKGCWKCGKEGHQMKDCTERQANFLGKIWPSHKERPGNFLQSRPEPSAPPEESFRFGEETATPSQKQEPKELYPLASLKSLFGNDP

SEQ ID NO: 395 - protein, 504 aa, Artificial Sequence
  HIV Gag
MGARASVLSGGELDRWEKIRLRPGGKKKYRLKHIVWASRELERFAVNPGLLESSEGCRQILGQLQPSLKTGSEELTSLYNTVATLYCVHQRIEIKDTKEALEKIEEEQTKSMKKAQQAAADTGNSSQVSQNYPIVQNLQGQMVHQAISPRTLNAWVKVIEEKAFSPEVIPMFSALSEGATPQDLNTMLNTVGGHQAAMQMLKETINEEAAEWDRLHPVHAGPIAPGQMREPRGSDIAGTTSTLQEQIGWMTNNPPIPVGEIYKRWIILGLNKIVRMYSPVSILDIRQGPKEPFRDYVDRFYKTLRAEQATQEVKNWMTETLLVQNANPDCKTILKALGPAATLEEMMTACQGVGGPGHKARVLAEAMSQVTNPATIMMQRGNFRNQRKNVKCFNCGKEGHIARNCRAPRKKGCWKCGKEGHQMKECTERQANFLGKIWPSYKGRPGNFLQSRPEPTAPPEESFRFGEETATPSQKQEQKQEPIDKELYPLTSLRSLFGNDPSSQ

SEQ ID NO: 396 - protein, 506 aa, Artificial Sequence
  HIV Gag
MGARASVLSGGELDRWENIRLRPGGKKKYKLKHVVWASRELERFAVNPGLLETSEGCRQILGQLQPSLQTGSEELKSLYNTVATLYCVHQKIEIKDTKEALEKIEEEQNKSKKKAQQAAADTGNRGNSSQVSQNYPIVQNIEGQMVHQAISPRTLNAWVKVVEEKAFSPEVIPMFSALSEGATPQDLNTMLNTVGGHQAAMQMLKETINEEAAEWDRLHPVHAGPITPGQMREPRGSDIAGTTSTLQEQIGWMTNNPPIPVGEIYKRWIILGLNKIVRMYSPSSILDIRQGPKEPFRDYVDRFYKTLRAEQASQEVKNRTTETLLVQNANPDCKTILKALGPAATLEEMMTACQGVGGPGHKARVLAEAMSQVTNSATIMMQRGNFRNQRKIIKCFNCGKEGHIAKNCRAPRKRGCWKCGKEGHQMKDCTERQANFLGKIWPSCKGRRNFPQSRTEPTAPPEESFRFGEETTTPYQKQEKKQETIDKDLYPLASLKSLFGNDPLSQ

SEQ ID NO: 397 - protein, 500 aa, Artificial Sequence
  HIV Gag
MGARASVLSGGELDRWEKIRLRPGGKKKYKLKHIVWASRELERFAVNPSLLETSEGCRQILGQLQSSLQTGSEELKSLYNTVATLYCVHQRIEVKDTKEALDKIEEEQNKSKKKAQQAAADTGNSSQVSQNYPIVQNIQGQMVHQAISPRTLNAWVKVVEEKAFSPEVIPMFSALSEGATPQDLNTMLNTVGGHQAAMQMLKETINEEAAEWDRLHPVQAGPVAPGQMREPRGSDIAGTTSTLQEQIGWMTNNPPIPVGEIYKRWIILGLNKIVRMYSPSSILDIKQGPKEPFRDYVDRFYKTLRAEQASQEVKNWMTETLLVQNANPDCKTILKALGPGATLEEMMTACQGVGGPGHKARVLAEAMSQVTNSATIMMQRGNFRNQRKTVKCFNCGKEGHIAKNCRAPRKKGCWKCGKEGHQMKDCTERQANFLGKIWPSHKGRPGNFLQSRPEPTAPPEESFRFGEETTTPSQKQEPIDKELYPLASLRSLFGNDPSSQ

SEQ ID NO: 398 - protein, 501 aa, Artificial Sequence
  HIV Gag
MGARASVLSGGKLDKWEKIRLRPRGKKRYKLKHIVWASRELERFAVNPSLLETAEGCRQILGQLQPALQTGSEELKSLYNAVATLYCVHQNIEVRDTKEALDKIEEEQNKSKKKAQQAAADTGNGSQVSQNYPIVQNLQGQMVHQAISPRTLNAWVKVVEEKAFSPEVIPMFSALSEGATPQDLNTMLNTVGGHQAAMQMLKETINEEAAEWDRLHPVHAGPIAPGQMREPRGSDIAGTTSTLQEQIGWMTNNPPIPVGEIYKRWIILGLNKIVRMYSPISILDIRQGPKEPFRDYVDRFYKTLRAEQASQDVKNWMTETFLVQNANPDCKTILKALGPAATLEEMMTACQGVGGPSHKARILAEAMSQVTNSATIMLQKGNFRDQRKIVKCFNCGKVGHIAKNCRAPRKKGCWKCGKEGHQMKDCTNEGRQANFLGKIWPSHKGRPGNFLQSRPEPTAPPEESFRFGEETTPSQKQEKIDKELYPLASLKSLFGNDPSSQ

SEQ ID NO: 399 - protein, 502 aa, Artificial Sequence
  HIV Gag
MGARASVLSGGELDKWEKIRLRPGGKKKYKLKHIVWASRELERFAVNPGLLETSEGCRQILGQLQPSLQTGSEELRSLYNTVATLYCVHQRIDVKDTKEALEKIEEEQNKSKKKAQQAAAAAGTGNSSQVSQNYPIVQNLQGQMVHQAISPRTLNAWVKVVEEKAFSPEVIPMFSALSEGATPQDLNTMLNTVGGHQAAMQMLKETINEEAAEWDRVHPVHAGPIAPGQMREPRGSDIAGTTSTLQEQIGWMTNNPPIPVGEIYKRWIILGLNKIVRMYSPTSILDIRQGPKEPFRDYVDRFYKTLRAEQASQDVKNWMTETLLVQNANPDCKTILKALGPAATLEEMMTACQGVGGPGHKARVLAEAMSQVTNPANIMMQRGNFRNQRKTVKCFNCGKEGHIAKNCRAPRKKGCWRCGREGHQMKDCTERQANFLGKIWPSYKGRPGNFLQSRPEPTAPPEESFRFGEEKTTPSQKQEPIDKELYPLTSLRSLFGNDPSSQ

SEQ ID NO: 400 - protein, 500 aa, Artificial Sequence
  HIV Gag
MGARASVLSGGELDRWEKIRLRPGGNKKYKLKHIVWASRELERFAVNPGLLETSEGCRQILGQLQPSLQTGSEELRSLYNTVAVLYCVHQKIEVKDTKEALDKIEEEQNKSKKKAQQAAADTENRNQVSQNYPIVQNLQGQMVHQALSPRTLNAWVKVIEEKAFSPEVIPMFSALSEGATPQDLNTMLNTVGGHQAAMQMLKETINEEAAEWDRLHPVHAGPIAPGQMREPRGSDIAGTTSTLQEQIAWMTNNPPIPVGEIYKRWIILGLNKIVRMYSPVSILDIRQGPKEPFRDYVDRFYKTLRAEQATQEVKNWMTETLLVQNANPDCKTILKALGPGATLEDMMTACQGVGGPGHKARVLAEAMSQVTNTATMMMQRGNFRSPRKTIKCFNCGKEGHIARNCRAPRKKGCWKCGQEGHQMKDCTERQANFLGKIWSSQKGRPGNFPQSRLEPTAPPEESFRFREETTTPSQKQEPIDKELYPLTSLKSLFGNDPSSQ

SEQ ID NO: 401 - protein, 500 aa, Artificial Sequence
  HIV Gag
  MISC_FEATURE (239)..(239): Xaa can be any amino acid
  MISC_FEATURE (244)..(246): Xaa can be any amino acid
  MISC_FEATURE (253)..(253): Xaa can be any amino acid
  MISC_FEATURE (363)..(363): Xaa can be any amino acid
  MISC_FEATURE (393)..(394): Xaa can be any amino acid
  MISC_FEATURE (401)..(401): Xaa can be any amino acid
  MISC_FEATURE (404)..(404): Xaa can be any amino acid
  MISC_FEATURE (424)..(424): Xaa can be any amino acid
  MISC_FEATURE (426)..(427): Xaa can be any amino acid
  MISC_FEATURE (432)..(432): Xaa can be any amino acid
  MISC_FEATURE (436)..(436): Xaa can be any amino acid
  MISC_FEATURE (442)..(442): Xaa can be any amino acid
  MISC_FEATURE (447)..(447): Xaa can be any amino acid
  MISC_FEATURE (467)..(467): Xaa can be any amino acid
MGARASMLSGGELDKWEKIRLRPGGKKKYRLKHLVWASRELERFAVNPGLLETAEGCRQILRQLQPSLQTGSEELRSLFNTVATLYCVHQRIGVKDTKEALEKIEEEQNKSKKKAQQAEADTGNNSKVSQNYPIVQNLQGQMVHQALSPRTLFAWVKVVEEKAFSPEVIPMFSALSEGATPQDLYTMLNTVGGHQAAMQMLKETINDEAAEWDRLHPVQAGPVAPGQMREPRGSDIAGXTSTLXXXIGWMTHXPPIPVGEIYKRWIILGLNKIVRMYSPTSILDIRQGPKEPFRDYVDRFYKTLRAEQASQEVKNWMTETLLVQNANPDCKTILKALGPGATLEEMMTACQGVGGPGHKARVXAEAMSQVTGSNAIMMQKGNFRNQRKTVKCXXCGKEGHXARXCKAPRKRGCWKCGKEGHQMXDXXERQAXFLGXIRPSHXGRPGXFLQNRPEPSAPPAESFRFGXETTTPSQKQEPIDKELYPLASLRSLFVNDPSSQ

SEQ ID NO: 402 - protein, 500 aa, Artificial Sequence
  HIV Gag
MGARASVLSAGELDKWEKIRLRPGGKKQYRLKHIVWASRELERFAVDPGLLETSEGCRQILGQLQPSLQTGSEELRSLYNTVATLYCVHQKIEVKDTKEALEKIEEEQNKSKKKAQQAAADTGNSSQVSQNYPIVQNLQGQMVHQAISPRTLNAWVKVVEEKAFSPEVIPMFSALSEGATPQDLNTMLNTVGGHQAAMQMLKETINEEAAEWDRLHPVHAGPIAPGQMREPRGSDIAGTTSTLQEQIGWMTNNPPIPVGEIYKRWIILGLNKIVRMYSPTSILDIRQGPKEPFRDYVDRFYKTLRAEQASQEVKNWMTETLLVQNANPDCKTILKALGPAATLEEMMTACQGVGGPGHKARVLAEAMSQVTNSATIMMQRGNFRNQRKTVKCFNCGKEGHIAKNCRAPRKKGCWKCGKEGHQMKDCTERQANFLGKIWPSHKGRPGNFLQSRPEPTAPSEESVRFGEETTTPSQKQEPIDKELYPLASLRSLFGSDPSSQ

SEQ ID NO: 403 - protein, 499 aa, Artificial Sequence
  HIV Gag
MGARASVISGGELDKWEKIRLRPGGHKKYRLKHIVWASRELERFAVNPGLLETSEGCRQILEQLQPALKTGSEELRSLYNTVATLYCVHQKIDVKDTKEALEKIEEEQNSKKKAQQAAANTGNNSQVSQNYPIVQNLQGQMVHQAISPRTLNAWVKVVEEKAFSPEVIPMFSALSEGATPQDLNTMLNTVGGHQAAMQMLKETINEEAAEWDRVHPVHAGPIPPGQMREPRGSDIAGTTSTLQEQIQWMTSNPPVPVGEIYKRWIILGLNKIVRMYSPTSILGIRQGPKEPFRDYVDRFYKTLRAEQTSQDVKNWMTETLLVQNANPDCKTILKALGPAATLEEMMTACQGVGGPGHKARVLAEAMSQVTNSGTIMMQRGNFRNQRKTIKCFNCGKEGHIAKNCRAPRKKGCWKCGKEGHQMKDCTERQANFLGKIWPSHKGRPGNFLQSRPEPTAPPAESFRFGEEVTTPSQKQEPIDKEMYPLASLRSLFGNDPSSQ

SEQ ID NO: 404 - protein, 496 aa, Artificial Sequence
  HIV Gag
MGARASILRGGKLDAWERIKLKPGGKKHYMMKHLVWASRELERFALDPGLLETSEGCKQIMKQLQPALQTGTKELISLHNTVATLYCVHEKIDVRDTKEALDKIKEEQNKSQQKTQQAEAADKGKVSQNYPIVQNLQGQMVHQPISARTLNAWVKVVEEKAFSPEVIPMFTALSEGATPQDLNTMLNTVGGHQAAMQMLKDTINEEAAEWDRLHPVHAGPVAPGQMREPRGSDIAGTTSTLQEQITWMTNNPPVPVGDIYKRWIILGLNKIVRMYSPVSILDIKQGPKEPFRDYVDRFFKTLRAEQATQDVKNWMTDTLLVQNANPDCKTILRALGPGASLEEMMTACQGVGGPGHKARVLAEAMSKVNNTNIMMQRSNCKGPKRTIKCFNCGKEGHLARNCRAPRKKGCWKCGKEGHQVKDCTERQANFLGKIWPSHRGRPGNLLQNRTEPTAPPEESFRFGEETTTPSRKQETIDKELPLTSLKSLFGSDPLST

SEQ ID NO: 405 - protein, 492 aa, Artificial Sequence
  HIV Gag
MGARASILRGGKLDAWEKIRLRPGGKKQYRIKHLVWASRELERFALNPGLLETSEGCKQIIQQLQPALQTGTEELRSLFNTVATLYCVHKKIEVRDTKEALDKIEEEQNKCQQKIQQAEAADKGKVSQNYPIVQNLQGQMVHQAISPRTLNAWVKVIEEKAFSPEVIPMFTALSEGATPQDLNTMLNTVGGHQAAMQMLKDTINEEAAEWDRLHPVHAGPIAPGQMREPRGSDIAGTTSTLQEQIAWMTSNPPIPVGDIYKRWIILGLNKIVRMYSPVSILDIKQGPKEPFRDYVDRFFKTLRAEQSTQEVKNWMTDTLLVQNANPDCKTILRALGPGASLEEMMTACQGVGGPSHKARVLAEAMSQTNTNVMMQRSNFKGPRRIVKCFNCGKEGHIARNCRAPRKKGCWKCGKEGHQMKDCTERQANFLGKIWPSHKGRPGNFLQSRPEPTAPPAESFRFEETTPVPKQEPKDREPLTSLKSLFGSDPLSQ

SEQ ID NO: 406 - protein, 490 aa, Artificial Sequence
  HIV Gag
MGARASILRGGKLDTWEKIRLRPGGKKRYMIKHLVWASRELERFALNPGLLGTSEGCKQIMKQLQPALQTGTEEIRSLYNTVATLYCVHEGIEVQDTKEAVDKIEEEQNKSQQKTQQAEAADKRVSQNYPIVQNLQGQMVHQAISPRTLNAWVKVIEEKAFSPEVIPMFTALSEGATPQDLNTMLTTVGGHQAAMQMLKDTINEEAAEWDRLHPVHAGPVAPGQMREPRGSDIAGTTSTLQEQIAWMTSNPPIPVGDIYKRWIILGLNKIVRMYSPVSILDIKQGPKESFRDYVDRFFKTLRAEQSSQEVKNWMTDTLLVQNANPDCRTILKALGPGASLEEMMTACQGVGGPSHKARILAEAMSQANNSNIMMQKNNFKGPTRIVKCFNCGKEGHIARNCKAPRKKGCWKCGKEGHQMKDCTERRANFLGKIWPSHKGRPGNFLQSRPEPTAPPAESFEETTPAPKQETKDREPLISLKSLFGSDPLSQ

SEQ ID NO: 407 - protein, 494 aa, Artificial Sequence; identical to SEQ ID NO: 335
  HIV Gag

SEQ ID NO: 408 - protein, 492 aa, Artificial Sequence; identical to SEQ ID NO: 336
  HIV Gag

SEQ ID NO: 409 - protein, 504 aa, Artificial Sequence
  HIV Gag
MGARASILRGEKLDAWEKIKLRPGGKKHYMLKHLVWANRELEKFALNPDLLDTSAGCKQIIKQLQPALQTGTEELKSLFNTVATLYCVHQKIEIKDTKEALDKIEEEQNESQQKTQQAGAADRGKDSQNYPIVQNMQGQMVHQPISARTLNAWVKVVEEKAFSPEVIPMFTALSEGATPQDLNTMLNTVGGHQAAMQMLKDTINEEAAEWDRLHPVHAGPVAPGQMRDPRGSDIAGTTSTLQEQIAWMTGNPPVPVGDIYKRWIILGLNKIVRMYSPVSILDIKQGPKEPFRDYVDRFFKTLRAEQATQDVKNWMTDTLLVQNANPDCKTILRALGPGASLEEMMTACQGVGGPAHKARVLAEAMSQVNNTTIMMQKSNFKGPKRAIKCFNCGKEGHLARNCRAPRKKGCWKCGKEGHQMKDCTERQANFLGRLWPSNKGRPGNFLQSRPEPTAPPESLRPEPTAPPPESFRFEEATPSPKQELKDREALTSLKSLFGNDHLLQ

SEQ ID NO: 410 - protein, 491 aa, Artificial Sequence
  HIV Gag
MGARASILRGGKLDKWERIRLRPGGKKHYMLKHLVWASRELERFALNPGLLETAEGCKQIIKQLQPALQTGTEELKSLHNTVATLYCVHAGIEVRDTKEALDKIEEEQNKIQQKTQQAKEADGKVSQNYPIVQNLQGQMVHQAISPRTLNAWVKVIEEKAFSPEVIPMFTALSEGATPQDLNTMLNTVGGHQAAMQMLKDTINEEAAEWDRLHPIHAGPIAPGQMREPRGSDIAGTTSSLQEQIAWMTGNPPVPVGDIYKRWIILGLNKIVRMYSPVSILDIRQGPKEPFRDYVDRFFKTLRAEQATQDVKNWMTDTLLVQNANPDCKTILRALGPGASLEEMMTACQGVGGPGHKARVLAEAMSQANSTILMQRSNFKGSKRIVKCFNCGKEGHIAKNCRAPRKKGCWKCGKEGHQMKDCTERQANFLGKIWPSHKGRPGNFLQSRPEPTAPPAESFRFEETTPAPKQEPKDREPLTSLKSLFGSDLLSQ

SEQ ID NO: 411 - protein, 491 aa, Artificial Sequence
  HIV Gag
MGARASILRGEKLDKWEKIRLRPGGKKHYMLKHLVWASRELDRFALNPGLLETSEGCKQIIKQLQPALQTGTEELRSLHNTVVTLYCVHAGIEVRDTKEALDKIEEEQNKNQQKTQQAKEADEKVSQNYPIVQNLQGQMVHQALSPRTLNAWVKVIEEKAFSPEVIPMFTALSEGATPQDLNTMLNTVGGHQAAMQMLKDTINEEAAEWDRLHPIHAGPIAPGQMREPRGSDIAGTTSSLQEQIAWMTGNPPVPVGDIYKRWIILGLNKIVRMYSPVSILDIKQGPKEPFRDYVDRFFKTLRAEQATQDVKNWMTDTLLVQNANPDCKTILRALGPGASLEEMMTACQGVGGPSHKARVLAEAMSQTNSAILMQKSNFKGSKRIIKCFNCGKEGHLARNCRAPRKKGCWKCGKEGHQMKDCTERQANFLGKIWPSHKGRPGNFLQSRPEPTAPPAESFRFEETPPAPKQEPKDREPLTSLRSLFGSDPLSQ

SEQ ID NO: 412 - protein, 500 aa, Artificial Sequence
  HIV Gag
MGARASILRGEKLDKWERIRLRPGGKKHYMLKHLVWASRELDRFALNPGLLEAAEGCKQIIKQLQPALQTGTEELRSLHNTVATLYCVHEGIEVRDTKEALDKIEEEQNKSQQKTQQAKEADGKVSQNYPIVQNLQGQMVHQPISPRTLNAWVKVIEEKAFSPEVIPMFTALSEGATPQDLNTMLNTVGGHQAAMQMLKDTINEEAAEWDRLHPVHAGPIAPGQIREPRGSDIAGTTSTLQEQIAWMTGNPPVPVGDIYKRWIILGLNKIVRMYSPVSILDIKQGPKEPFRDYVDRFFRTLRAEQATQDVKNWMTDTLLVQNANPDCKTILRALGPGASLEEMMTACQGVGGPGHKARVLAEAMSQANSNILMQRSNFKGSKRTVKCFNCGKEGHIARNCRAPRKKGCWKCGKEGHQMKDCTERQANFLGKIWPSHKGRPGNFLQNRPEPTAPPARPEPTAPPAESFRFEETTPALKQEPKDREPLTSLKSLFGSDPLSQ

SEQ ID NO: 413 - protein, 488 aa, Artificial Sequence
  HIV Gag
MGARASILRGGKLDKWEKIRLRPGGKKHYMLKHLVWASRELEKFALNPGLLETSEGCKQIMKQLQPALQTGTEELRSLFNTVATLYCVHAEIEVRDTKEALDKIEEEQNKSQQKTQQAKEADSQNYPIVQNLQGQMVHQAISPRTLNAWVKVIEEKAFSPEVIPMFTALSEGATPQDLNTMLNTVGGHQAAMQMLKDTINEEAAEWDRIHPVHAGPIAPGQMREPRGSDIAGTTSTLQEQIAWMTSNPPVPVGEIYKRWIILGLNKIVRMYSPVSILDTKQGPKEPFRDYVDRFFKTLRAEQATQDVKNWMTDTLLVQNANPDCKTILRALGPGASLEEMMTACQGVGGPSHKAKVLAEAMSQTNSAILMQRSNFKGSKRIIKCFNCGKEGHLARNCRAPRKKGCWKCGKEGHQMKDCTERQANFLGKIWPSHKGRPGNFLQSRPEPTAPPAESFRFEETPPAPKQEPKEREPLTSLRSLFGSDPLSQ

SEQ ID NO: 414 - protein, 491 aa, Artificial Sequence
  HIV Gag
MGARASILRGGKLDKWEKIRLRPGGKKRYMLKHLVWASRELDRFAVNPGLLETAEGCKQIIKQLQPALQTGTEELRSLFNTVATLYCVHAGIEVRDTKEALDKIEEEQNKIKQKTQQAKEDDGKVSQNYPIVQNLQGQMVHQAISPRTLNAWVKVIEEKAFSPEVIPMFTALSEGATPQDLNTMLNTVGGHQAAMQMLKDTINEEAAEWDRLHPVPAGPIAPGQLREPRGSDIAGTTSTLQEQIAWMTNNPPVPVGDIYKRWIILGLNKIVRMYSPVSILDIRQGPKEPFRDYVDRFFKTLRAEQATQDVKNWMTETLLVQNANPDCKTILRALGPGASLEEMMTACQGVGGPSHKARVLAEAMSQTNSAILMQRSNFKGSKRIVKCFNCGKEGHLARNCRAPRKKGCWKCGKEGHQMKDCTERQANFLGKIWPSHKGRPGNFLQSRPEPTAPPAESFRFEETTPAPKQEPKDREPLTSLRSLFGSDPLSQ

SEQ ID NO: 415 - protein, 498 aa, Artificial Sequence
  HIV Gag
  MISC_FEATURE (237)..(237): Xaa can be any amino acid
MGARASVLSGGKLDAWEKIRLRPGGKKKYRMKHLVWASRELERFALNPGLLETAEGCQQLIEQLQSNLKTGSEEIKSLFNTIATLWCVHQRIDVKDTKEALDKIEEVQNKNKQKTQQAAAGTGSNSKVSQNYPIVQNAQGQMVHQPLSPRTLNAWVKVVEEKGFNPEVIPMFSALSEGATPQDLNMMLNIVGGHQAAMQMLKDTINEEAAEWDRLHPVHAGPIPPGQMREPRGSDIXGTTSNLQEQIGWMTSNPPIPVGDIYKRWIILGLNKIVRMYSPVSILDIRQGPKEPFRDYVDRFFKTLRAEQATQEVKNWMTETLLVQNANPDCKSILKALGTGATLEEMMTACQGVGGPGHKARVLAEAMSQVQHANIMMQRGNFKGQKRIKCFNCGKEGHLARNCRAPRKRGCWKCGQEGHQMKDCTERQANFLGKIWPLNKGRPGNFPQSRLEPTAPPAESLGMGEEITSFPKQEQKDKEHPSPLVSLKSLFGNDPLSQ

SEQ ID NO: 416 - protein, 498 aa, Artificial Sequence
  HIV Gag
MGARASILSGGKLDAWEKIRLRPGGKKQYRMKHLVWASRELERFALNPGLLETAEGCQQLIEQLQSTIKTGSEELKSLFNTIATLWCVHQRIDVKDTKEALDKIEEVQNKSKQKAQQAAAGTGSSSKVSQNYPIVQNAQGQMVHQALSPRTLNAWVKVVEEKGFNPEVIPMFSALSEGATPQDLNMMLNIVGGHQAAMQILKDTINEEAAEWDRVHPVHAGPIPPGQMREPRGADIAGTTSTLHEQIGWMTSNPPIPVGEIYKKWIILGLNKIVRMYSPVSILDIRQGPKEPFRDYVDRFFKTLRAEQATQEVKNWMTETLLVQNANPDCKSILKALGTGATLEEMMTACQGVGGPGHKARVLAEAMSQVHHTNIMMQKGNFKGQRKIKCFNCGKEGHLARNCRAPRKKGCWKCGREGHQMKDCTERQANFLGKIWPSSKGRPGNFPQSRPEPTAPPMESLGMGEEITSFPKQEQKDKKQPPPLVSLKSLFGNDPLSQ

SEQ ID NO: 417 - protein, 498 aa, Artificial Sequence
  HIV Gag
MGARASVLSGGKLDAWEKIRLRPGGKKKYRLKHLVWASRELERFALNPGLLETAEGCQQLLEQLQSTLKTGSEELKSLFNTIATLWCVHQRINVTDTKEALDKIEEIQNKNKQKTQQAAADTGSSSKVSQNYPIVQNAQGQMIHQALSPRTLNAWVKVVEEKGFNPEVIPMFSALSEGATPQDLNMMLNIVGGHQAAMQMLKDTINEEAAEWDRVHPVHAGPIPPGQMREPRGSDIAGTTSTLQEQIGWMTSNPPVPVGEIYKRWIILGLNKIVRMYSPVSILDIRQGPKEPFRDYVDRFFKTLRAEQATQEVKNWMTETLLVQNANPDCKSILKALGTGATLEEMMTACQGVGGPGHKARVLAEAMSQVQHANIMMQRGNFKGQKRIKCFNCGKEGHLARNCRAPRKKGCWKCGKEGHQMKDCTERQANFLGRIWPSSKGRPGNFPQSRPEPTAPPAESLGMGEEITSFSRQEQKDREHPPPLVSLKSLFGNDPLSQ

SEQ ID NO: 418 - protein, 498 aa, Artificial Sequence
  HIV Gag
MSARASVLSGEKLNAWEKIRLRPGGRKKYKLKHLVWASRELEKFALNPGLLETAEGCQQLIEQLQSTLKTGSEELKSLFNTIATLWCVHQKIEVKDTKKALDKIEEVQKKSQQKTQQAAAGTGSSSKVSQNYPIVQNAQGQMVHQPVSPRTLNAWVKVVEEKGFNPEVIPMFSALSEGATPQDLNMMLNIVGEHQAAMQMLKETINEEAAEWDRVHPVHAGPIPPGQMREPRGSDIAGTTSTLQEQIGWMTNNPPIPVGDIYKRWIILGLNKIVRMYRPVSILDIRQGPKEPFRDYVDRFYKTLRAEQATQEVKNWMTETLLVQNANPDCKSILKSLGTGATLEEMMTACQGVGGPSHKARVLAEAMSHAQHANIMMQRGNFKGQKRIKCFNCGKEGHLARNCRAPRKKGCWKCGKEGHQMKDCTERQANFLGKFWPSNKGRPGNFPQSRPEPTAPPAENWGMGEETTSLLKQEQKDKEHHPPLVSLKSLFGNDPSSQ

SEQ ID NO: 419 - protein, 495 aa, Artificial Sequence
  HIV Gag
MGARASVLSGKLDALEKIRLRPGGKKKYKMKHLVWASRELERFALNPGLLETAEGCQQIIEQLQSALKTGSEELKSLYNTVVTLWCVHQRIDVKDTKEALDKIEEVQNKSQQKTQQAAAGTGSSSKVSQNYPIVQNAQGQMVHQPLSPRTLNAWVKVVEEKGFNPEVIPMFSALSEGATPQDLNMMLNIVGGHQAAMQMLKETTNEEAAEWDRVHPVHAGPIPPGQMREPRGSDIAGTTSTLQEQIGWMTNNPPIPVGDIYKRWIILGLNKIVRMYSPVSILDIRQGPKEPFRDYVDRFYKTLRAEQATQEVKNWMTETLLVQNANPDCKSILKALGTGATLEEMMTACQGVGGPSHKARVLAEAMSQAQHANIMMQRGNFKGPRRIKCFNCGKEGHLARNCRAPRKKGCWKCGKEGHQMKDCTERQANFLGKIWPSNKGRPGNFPQSRPEPTAPPAEWGMGEEITSLPKQEQKDKDPPPLVSLKSLFGNDPLSQ

SEQ ID NO: 420 - protein, 490 aa, Artificial Sequence
  HIV Gag
MGARASVLSGGKLDAWEKIRLRPGGKKKYKMKHLVWASRELERFALNPGLLETAEGCQQLIEQLQSTLKTGSEELKSLYNTIATLWCVHQRIEVKDTKEALDKIEEVQKKSQQKKQQAAADTGSSSKVSQNYPIVQNAQGQMVHQPLSPRTLNAWVKVIEEKGFNPEVIPMFSALSEGATPQDLNMMLNIVGGHQAAMQMLKETINEEAAEWDRVHPVHAGPIPPGQMREPRGSDIAGTTSTLQEQIGWMTNNPPIPVGDIYKRWIILGLNKIVRMYQPVSILDIRQGPKEPFRDYVDRFYKVLRAEQATQEVKNWMTETLLVQNANPDCKSILKALGTGATLEEMMTACQGVGGPSHKARVLAEAMSQAQHANIMMQRGNFKGQTRIKCFNCGKEGHLARNCRAPRKKGCWKCGKEGHQMKDCTERQANFLGKIWPSNKGRPGNFPQSKPEPTAPPAENWGMGEEQKDKEHPPPSVSLKSLFGNDPLSQ

SEQ ID NO: 421 - protein, 498 aa, Artificial Sequence
  HIV Gag
MGAKASVLSGGKLDAWEKIRLRPGGRKKYHLKHIVWASRELERFALNPGLLETAEGCQQLIEQLQSTLKTGSEELRSLFNTIVTLWCVHQRIEVKDTKEALDKIEEVQNKSQQKTQQAAAGTGSSSTVSHNYPIVQNAQGQMVHQPISPRTLNAWVKVIEEKGFSPEVIPMFSALSEGATPQDLNMMLNIVGGHQAAMQMLKETINEEPAEWDRVHPVHAGPIPPGQIREPRGSDIAGTTTTLQEQIGWMTNNPPIPVGSIYKRWIILGLNKIVRMYSPVSILDIRQGPKEPFRDYVDRFYKTLRAEQATQEVKNWMTETLLVQNANPDCKSILKALGTGATLEEMMTACQGVGGPSHKARVLAEAMSHAQQANIMMQRGNFKGQKRIKCFNCGKEGHLARNCRALRKKGCWKCGKEGHQMKDCTERQANFLGKIWPSNKGRPGNFPQSRPEPTAPPAENWGMGEETTSSLKQEQKDKEPPPPLISLKSLFGNDPLSQ

SEQ ID NO: 422 - protein, 503 aa, Artificial Sequence
  HIV Gag
MGARASVLSGGKLDAWEKIRLRPGGRKKYRLKHLVWASRELERFALNPSFLETAEGCQQIIEQLQSTLKTGLEELKSLFNTVATLWCVHQRIEVKDTKEALDKIEEVQNKSQRKTQQAAAGTGSSSKVSQNYPIVQNAQGQMAHQPLSPRTLNAWVKVVEEKGFNPEVIPMFSALSEGATPQDLNMMLNIVGGHQAAMQMLKETINEEPAEWDRVHPVHAGPIPPGQMREPRGSDIAGTTSTLQEQIGWMTNNPPIPVGDIYKRWIILGLNKIVRMYSPVSILDIRQGPKEPFRDYVDRFYKTLRAEQATQEVKNWMTETLLVQNANPDCKSILKALGTGATLEEMMTACQGVGGPSHKARVLAEAMSHAQHATIMMQRGNFKGQKRIKCFNCGREGHLARNCRAPRKQGCWKCGKEGHQMKDCTERQANFLGKIWPSNKGRPGNFPQSRPEPTAPPAENWGMGEEITGEEITSLPKQEQKDKEHPPPLVSLKSLFGNDPLSQ

SEQ ID NO: 423 - protein, 498 aa, Artificial Sequence
  HIV Gag
MGARASILSGGKLDAWEKIRLRPGGRKKYRMKHLVWASRELERFALNPGLLETAEGCQQLIGQLQSNLKTGSEELRSLFNTVATLWCVHQRIEVKDTKEALDKIEEAQKKSQQKTQQAAAGTGSSSKVSQNYPIVQNAQGQMVHQPVSPRTLNAWVKVVEEKGFNPEVIPMFSALSEGATPQDLNMMLNIVGGHQAAMQMLKETINEEAAEWDRVHPVHAGPIPPGQMREPRGSDIAGTTSTLQEQIGWMTSNPPIPVGDIYKRWIILGLNKIVRMYSPVSILDIRQGPKEPFRDYVDRFYKTLRAEQATQEVKNWMTETLLVQNANPDCKSILKALGTGATLEEMMTACQGVGGPSHKARVLAEAMSHVQQANIMMQRGNFKGQKRIKCFNCGKEGHLARNCRAPRKKGCWKCGKEGHQMKDCTERQANFLGKIWPSNKGRPGNFPQSRPEPTAPPAENWGMGEEITSFLKQEQKDKEHPPPSVSLKSLFGNDPLSQ

SEQ ID NO: 424 - protein, 492 aa, Artificial Sequence
  HIV Gag
MGARASVLSGGKLDSWEKIRLRPGGKKKYRLKHLVWASRELERFALNPGLLETAEGCQQLIEQLQTALGTGSEELKSLYNTIATLWCVHKRIDIKDTKEALEKIEEVQNKSKQKTQQAAAATGSSSQNYPIVQNAQGQMTHQPMSPRTLNAWVKVIEEKAFSPEVIPMFTALSEGATPQDLNMMLNIVGGHQAAMQMLKDTINEEAAEWDRVHPVHAGPIPPGQMREPRGSDIAGTTSTPQEQIGWMTSNPPIPVGDIYKRWIILGLNKIVRMYSPVSILDIRQGPKEPFRDYVDRFFKTLRAEQATQEVKNRMTETLLVQNANPDCKSILRALGPGATLEEMMTACQGVGGPGHKARVLAEAMSQVQQSNIMMQRGNFRGQRTIKCFNCGKEGHLARNCKAPRKKGCWKCGKEGHQMKDCTEGQANFLGKIWPSSKGRPGNFPQSRPEPTAPPAESLGMGEEITSPPKQEARDQGLYPPLASLKSLFGNDP

SEQ ID NO: 425 - protein, 492 aa, Artificial Sequence
  HIV Gag
MGARASVLSGGKLDSWEKIRLRPAGKKKYRLKHLVWASRELERFALNPGLLETAEGCQQLMKQLQSALGTGSEELKSLYNTIATLWCVHQRIDIKDTKEALDKIEEVQNKSKQKTQQAEAATGSSSQNYPIVQNAQGQMTHQPMSPRTLNAWVKVIEEKAFSPEVIPMFTALSEGATPQDLNMMLNIVGGHQAAMQMLKDTINEEAAEWDRVHPVHAGPIPPGQMREPRGSDIAGTTSTLQEQIGWMTSNPPIPVGDIYKRWIILGLNKIVRMYSPVSILDIRQGPKEPFRDYVDRFFKTLRAEQATQEVKNWMTETLLVQNANPDCKSILRALGPGASLEEMMTACQGVGGPGHKARVLAEAMSQVQQSNIMMQRGNFRGQRTIKCFNCGKEGHLARNCKAPRKKGCWKCGKEGHQMKDCTERQANFLGKIWPSSKGRPGNFPQSRPEPTAPPAESFGMGEEITSPPKQEPRDQGLYPPLASLKSLFGNDP

SEQ ID NO: 426 - protein, 491 aa, Artificial Sequence
  HIV Gag
MGARVSVLRGGQLDTWEKIRLRPGGKKKYKMKLLVWASRELERFAVNPGLLETTEGCQQILEQLQPALKAGSEELKSLYNTVATLYCVHQKIDVRDTKEALDKLEEIQNKSKQKTQQAAANSQVSQNYPIVQNAQGQMVHQAISPRTLNAWVKVVEEKAFSPEVIPMFTALSEGATPQDLNMMLNIVGGHQAAMQMLKDTINEEAAEWDRTHPIHAGPNPPGQMREPRGSDIAGTTSNLQEQIAWMTGNPPIPVGEIYKRWIVLGLNKIVRMYSPVGILDIRQGPKEPFRDYVDRFFKTLRAEQATQEVKNWMTETLLVQNANPDCKTILRALGPGATLEEMMTACQGVGGPGHKARVLAEAMSQVQSPNILMQRGNFKGQKRIKCFNCGKEGHLARNCRAPRKKGCWKCGKEGHQMKDCTERQANFLGKIWPSNKGRPGNFPQSRPEPSAPPAESFGTREEITSSPQQEPRDKGLYPPLTSLKSLFGNDP

SEQ ID NO: 427 - protein, 492 aa, Artificial Sequence
  HIV Gag
MGARASVLSGGKLDAWEKIRLRPGGKKKYRLKHLVWASRELERFALNPGLLETAEGCQQLMEQLQSALRTGSEELKSLFNTIATLWCVHQRIDIKDTKEALDKMEEIQNKSKQKVQQTAAATGSSSQNYPIVQNAKGQMTHQSMSPRTLNAWVKVIEEKGFSPEVIPMFSALSEGATPQDLNMMLNIVGGHQAAMQMLKDTINEEAAEWDRVHPVHAGPIPPGQMREPRGSDIAGTTSTLQEQIGWMTSNPPIPVGEIYKRWIVLGLNKIVRMYSPVSILDIRQGPKEPFRDYVDRFFKTLRAEQATQEVKNWMTETLLVQNANPDCKSILRALGTGATLEEMMTACQGVGGPGHKARVLAEAMSQVQQANVMMQRGNFRGQRTIKCFNCGKEGHLARNCKAPRKRGCWKCGKEGHQMKDCTERQANFLGKIWPSSKGRPGNFPQSRPEPTAPPAESFGMGEEIPPSPQQEPRDKGLYPPLTSLKSLFGNDP

SEQ ID NO: 428 - protein, 492 aa, Artificial Sequence
  HIV Gag
MGARASVLSGGKLDAWEKIRLRPGGKKKYRLKHLVWASRELERFALNPGLLETAEGCQQLMEQLQSTLRTGSEELKSLFNTIATLWCVHQRIDIKDTKEALDKVEEVQKKSKQKTQQAAAAAGSSSQNYPIVQNAQGQMTHQSISPRTLNAWVKVVEEKAFSPEVIPMFSALSEGATPQDLNMMLNIVGGHQAAMQMLKDTINEEAAEWDRVHPVHAGPIPPGQMREPRGSDIAGTTSTLQEQIGWMTSNPPIPVGEIYKRWIVLGLNKIVRMYSPVSILDIRQGPKEPFRDYVDRFFKTLRAEQATQDVKNWMTETLLVQNANPDCKSILRALGPGATLEEMMTACQGVGGPSHKARVLAEAMSQVQQPNIMMQRGNFRGQRPIKCFNCGKEGHLARNCKAPRKKGCWKCGKEGHQMKDCTERQANFLGKIWPSSKGRPGNFPQSRPEPTAPPAESLGIGEEITSSQKQEPGDKGLYPPLASLKSLFGNDP

SEQ ID NO: 429 - protein, 494 aa, Artificial Sequence
  HIV Gag
GARASVLSGGKLDAWERIRLRPGGKKKYRLKHLVWASRELERFALNPGLLETAEGCQQIIEQLQSTLKTGSEELKSLFNTVATLYCVHQRIEVKDTKEALDKLEEIQEKSKQKTQQAAAATGSSSQNFPIVQNAQGQMVHQSISPRTLNAWVKVIEEKAFSPEVIPMFSALSEGATPQDLNMMLNIVGGHQAAMQMLKDTINEEAADWDRTHPVHAGPIPPGQMREPRGSDIAGTTSTLQEQIGWMTSNPPIPVGDIYKRWIILGLNKIVRMYSPVSILDIRQGPKEPFRDYVDRFFKTLRAEQATQEVKNWMTETLLVQNSNPDCRTILKALGPGATLEEMMSACQGVGGPGHKARVLAEAMSQAQQSNIMMQRGNFRGQRTIKCFNCGKEGHLARNCKAPRKRGCWKCGKEGHQMKDCTERQANFLGKIWPSSKGRPGNFPQSRPEPTAPPAESFGMGEEITSSPKQEPGDKGLYPPLTSLKSLFGNDPYSQ

SEQ ID NO: 430 - protein, 498 aa, Artificial Sequence
  HIV Gag
MGARASVLSGGKLDAWEKIRLRPGGKEKYRIKHLVWASRELERFALNPSLLETSEGCQQILEQLQPTLKTGSEELKSLYNTVATLYCVHQRIEIKDTKEALDKIEEIQNKSKQKTQQAATGTGSSSKVSQNYPIVQNAQGQMTHQSMSPRTLNAWVKVIEEKAFSPEVIPMFSALSEGATPQDLNMMLNIVGGHQAAMQMLKDTINEEAAEWDRLHPAQAGPFPPGQMREPRGSDIAGSSSTLQEQIGWMTSNPPIPVGDIYKRWIILGLNKIVRMYSPVSILDIRQGPKEPFRDYVDRFFKTLRAEQATQDVKNWMTETLLVQNANPDCKTILRALGSGATLEEMMTVCQGVGGPGHKARVLAEAMSQVQNANIMMQKSNFRGPKRIKCFNCGKEGHLARNCRAPRKKGCWKCGKEGHQMKDCTERQANFLGRIWPSSKGRPGNFPQSRPEPSAPPAENFGMGEEITPSLKQEQKDREQHPPSISLKSLFGDDPLSQ

SEQ ID NO: 431 - protein, 498 aa, Artificial Sequence
  HIV Gag
MGARASVLSGGKLDAWEKIRLRPGGKKKYRIKHLVWASRELERFAINPSLLETSEGCQQILEQLQPTLKTGSEELKSLYNTVATLYCVHRRIEIKDTKEALDKIEEIQNKSKQKTQQAATGTGSSSKVSQNYPIVQNAQGQMTHQSMSPRTLNAWVKVIEEKAFSPEVIPMFSALSEGATPQDLNMMLNIVGGHQAAMQMLKDTINEEAAEWDRLHPAQAGPFPPGQMREPRGSDIAGTTSTLQEQIGWMTSNPPIPVGDIYKRWIILGLNKIVRMYSPVSILDIRQGPKEPFRDYVDRFFKTLRAEQATQDVKNWMTETLLVQNANPDCKTILRALGSGATLEEMMTACQGVGGPGHKARVLAEAMSQVQNANIMMQKSNFRGPKRIKCFNCGKDGHLARNCRAPRKKGCWKCGKEGHQMKDCNERQANFLGKIWPSSKGRPGNFPQSRPEPSAPPAENFGMGEEITPSLKQEQKDRGQHPPSISLKSLFGNDPLSQ

SEQ ID NO: 432 - protein, 500 aa, Artificial Sequence
  HIV Gag
MGARASVLSGGKLDAWERIRLRPGGKKKYRLKHLVWASRELERFALNPGLLETAEGCQQLMEQLQSTLKTGSEELRSLYNTITTLWCVHQRIDVQDTKEALDKIEEIQSKSKQKTQQAAAAAGGSSNVSQNYPIVQNAQGQMVHQSISPRTLNAWVKVIEEKAFSPEVIPMFSALSEGATPQDLNMMLNIVGGHQAAMQMLKDTINEEAADWDRTHPVHAGPIPPGQMREPRGSDIAGTTSTLQEQIGWMTSNPPVPVGEIYKRWIILGLNKIVRTYSPISILDIRQGPKEPFRDYVDRFFKCLRAEQATQEVKNWMTETLLVQNANPDCKSILKALGTGATLEEMMTACQGVGGPSHKARVLAEAMSQASNAAAAIMMQKSKFKGQRRTIKCFNCGKEGHLARNCRAPRKKGCWKCGKEGHQMKDCTERQANFLGRMWPSSKGRPGNFLQNRPEPTAPPAECLERKEETTSSLKQEPRDKELYPLTSLKSLFGSDPLSQ

SEQ ID NO: 433 - protein, 500 aa, Artificial Sequence
  HIV Gag
MGARASVLSGGKLDAWERIRLRPGGKKKYRLKHLVWASRELERFALNPGLLETAEGCQQLMEQLQPTLRTGSEEVKSLFNTLATLWCVHQRIDVKDTKEALDKVEEVQKKSKQKTQQAAADTGGSSKVSQNYPIVQNAQGQMVHQAMSPRTLNAWVKVIEEKAFSPEVIPMFSALSEGATPQDLNMMLNIVGGHQAAMQMLKDTINEEASEWDRAHPVHAGPIPPGQMREPRGSDIAGTTSTLQEQIGWMTSNPPIPVGEIYKRWIILGLNKIVRMYSPVSILDIRQGPKEPFRDYVDRFFKCLRAEQATQEVKNWMTETLLVQNANPDCKSILKALGTGATLEEMMTACQGVGGPAHKARVLAEAMSQASNAAAAIMMQKSNFRGQKRIIKCFNCGKEGHLARNCRAPRKRGRWKCGKEGHQMKDCTERQANFLGRMWPSSKGRPGNFLQSRPEPTAPPAESLEMKEETTSSPKQEPRDKELYPLTSLKSLFGNHPLSQ

SEQ ID NO: 434 - protein, 498 aa, Artificial Sequence
  HIV Gag
MGARASVLSGGRLDAWEKIRLRPGGKKRYRIKHLIWASRELERFALNPGLLETAEGCQQLMEQLQSTLKTGSEELKSLFNLIATLWCVHQRIEVKDTKEALDKVEEMQNKSKQKTQQAAAGNSSNVSQNYPIAQNAQGQMVHQSISPRTLNAWVKVVEEKGFSPEVIPMFSALSEGATPQDLNMMLNIVGGHQAAMQMLKDTINEEAAEWDRVHPAHAGPNPAGQMREPRGSDIAGTTSTLQEQVGWMTSNPPIPVGDIYKRWIILGLNKIVRMYSPVSILDIRQGTKEPFRDYVDRFFKCLRAEQATQDVKNWMTETLLVQNANPDCKSILKALGTGATLEEMMTACQGVGGPSHKARVLAEAMSQASSAAAAIMMQKSNFKGPRRSIKCFNCGKEGHLARNCRAPRKKGCWKCGKEGHQMKDCPERQANSLGRMWPSSKGRPGNFLQSRTEPTAPPAESFEMKEETTSSPKQEQRDKELYPITSLKSLFGSDPLSR

SEQ ID NO: 435 - protein, 502 aa, Artificial Sequence
  HIV Gag
MGARASVLSGGKLDAWEKIRLRPGGKKKYRLKHLVWASRELERFALNPGLLETSEGCKQIISQLQPAIQTGTEELKSLYNTVATLYCVHERIEVKDTKEALEKIEEEQNKSKRKKAQQAEAGAGNSSQASQNYPIVQNIQGQMVHQALSPRTLNAWVKVIEEKAFSPEVIPMFSALSEGATPQDLNTMLNTVGGHQAAMQMLKETINEEAAEWDRLHPVQAGPVAPGQMRDPRGSDIAGTTSTLQEQIAWMTNNPPIPVGEIYKRWIILGLNKIVRMYSPVSILDIRQGPKEPFRDYVDRFYKTLRAEQATQEVKNWMTETLLVQNANPDCKTILKALGQQATLEEMMTACQGVGGPSHKARVLAEAMSQATNSAATAMMQRGNFKGPRKIIKCFNCGKEGHIAKNCRAPGKKGCWKCGREGHQMKDCTERQANFLGKVWPSHKGRPGNFLQSRPEPSAPPAESFRFGEEIASSPKQEQKDEGLYPPLASLKSLFGNDPLSQ

SEQ ID NO: 436 - protein, 501 aa, Artificial Sequence
  HIV Gag
MGARASVLSGGKLDAWEKIRLRPGGKKKYRLKHIVWASRELERFAINPGLLETSEGCKQIIAQLQPAIQTGSEELRSLYNTVATLYCVHEKIEVKDTKEALEKIEEEQNKSKSKRAQQAEAGTKNSGPVSQNFPIVQNLQGQMVHQALSPRTLNAWVKVIEEKAFSPEVIPMFTALSEGATPQDLNTMLNTVGGHQAAMQMLKETINEEAAEWDRVHPAQAGPIAPGQIREPRGSDIAGTTSTLQEQITWMTNNPPIPVGEIYKRWIILGLNKIVRMYSPVSILDIRQGPKEPFRDYVDRFYKTLRAEQASQDVKNWMTETLLVQNANPDCKTILKALGPQATLEEMMTACQGVGGPSHKARVLAEAMSQATGSPAVMMQRGNFKGPRKSIKCFNCGKEGHTAKNCRAPRKRGCWKCGREGHQMKDCIEGQANFLGRVWLSHKGRPGNFLQSRPEPSAPPAESFGFGEEITPSPKQEQKDEGKYPPLASLKSLFGNDPLSQ

SEQ ID NO: 437 - protein, 497 aa, Artificial Sequence
  HIV Gag
MGARASVLSGGKLDEWEKIRLRPGGKKKYKMKHLVWASRELERFAINPGLLETAEGCQQIIEQLQSTLKTGSEELKSLFNTVATLYCVHQRIKVTDTKEAIDKIEEIQKKSKQKAHQAAATGNSSNLSQNYPIVQNAQGQMVHQAMSPRTLNAWVKVIEDKAFSPEVIPMFTALSEGATPQDLNMMLNIVGGHQAAMQMLKDTINEEAAEWDRVHPVHAGPIPPGQIREPRGSDIAGTTSTLQEQIGWMTSNPPIPVGEIYKRWIILGLNKIVRMYSPVGILDIKQGPKEPFRDYVDRFFKTLRAEQATQEVKNWMTDTLLVQNANPDCKTILRALGPGATLEEMMTACQGVGGPGHKARVLAEAMSQASVGAIMMQKSNFKGPKRSIKCFNCGKEGHLARNCRAPRKKGCWKCGKEGHQMKDCTERQANFLGKIWPSNKGRPGNFLQNRPEPTAPPIESFGFGEEIAPSPKQESKEKEEKGLYPLASLKSLFGSDP

SEQ ID NO: 438 - protein, 497 aa, Artificial Sequence
  HIV Gag
MGARASVLSGGKLDEWEKIRLRPGGKKKYRLKHLVWASRELERFALNPSLLETAEGCQQIMEQLQSALRTGSEELKSLYNTVATLYCVHQRIKVTDTKEALDKIEEIQNKSKQKAQQAAAATGNSSNLSQNYPIVQNAQGQMVHQAISPRTLNAWVKVIEEKAFSPEVIPMFSALSEGATPQDLNMMLNIVGGHQAAMQMLKDTINEEAAEWDRVHPVHAGPIPPGQMREPRGSDIAGTTSTLQEQIGWMTGNPPVPVGEIYKRWIILGLNKIVRMYSPVSILDIRQGPKEPFRDYVDRFFKTLRAEQATQEVKNWMTDTLLVQNANPDCKTILKALGPGATLEEMMTACQGVGGPGHKARVLAEAMSQASGTLTAIMMQKSNYKGPKRSIKCFNCGREGHLARNCRAPRKKGCWKCGKEGHQMKDCTERQANFLGKIWPSNKGRPGNFLQNRPEPTAPPAESFGFGEETAPSPEQKPKEKELYPLTSLRSLFGNDP

SEQ ID NO: 439 - protein, 499 aa, Artificial Sequence
  HIV Gag
MGARASVLSGGKLDEWEKIRLRPGGKKKYRMKHLVWASRELERFALNPGLLETPEGCQQIMEQLQSTLRTGSEELKSLYNTVATLYCVHQRIKVTDTKEALHKIEEIQNKSKQKVQQAAAATGNSSQLSQNYPIVQNAQGQMIHQAISPRTLNAWVKAIEEKAFSPEVIPMFSALSEGATPQDLNMMLNIVGGHQAAMQMLKDTINEEAAEWDRMHPVQAGPMPPGQMREPRGSDIAGTTSTLLEQIGWMTSNPPIPVGEIYKRWIILGLNKIVRMYSPVSILDIRQGPKEPFRDYVDRFFKTLRAEQATQEVKNWMTDTLLVQNANPDCKTILKALGPGATLEEMMTACQGVGGPGHKARVLAEAMSQASGTVAAAIMMQKSNFKGPRKIKCFNCGKEGHLARNCRAPRKKGCWKCGKEGHQMKDCTERQANFLGRIWPSSKGRPGNFLQNRPEPTAPPAESFGFGEETAPSLKQEPKEKEKELYPLASLKSLFGNDP

SEQ ID NO: 440 - protein, 502 aa, Artificial Sequence
  HIV Gag
MGARASVLSGGKLDEWEKIRLRPGGKKKYRLKHLVWASRELDRFALNPGLLETAEGCQQIIEQLQSALKTGSEELRSLFNTVATLYCVHQRIKVQDTKEAVDKVEEIQNKSKQKTQQTTAATGNSSNLSQNYPIVQNAQGQMVHQAISPRTLNAWVKAIEEKAFSPEVIPMFSALSEGATPQDLNMMLNIVGGHQAAMQMLKDTINEEAAEWDRVHPAQAGPIPPGQIRDPRGSDIAGTTSTLQEQIRWMTSNPPIPVGEIYKRWIILGLNKIVRMYSPVSILDIRQGPKEPFRDYVDRFFKTLRAEQATQEVKNWMTDTLLVQNANPDCKTILKALGPGATLEEMMTACQGVGGPGHKARVLAEAMSQVSGATAAIMMQKSNFKGQRKNIKCFNCGKEGHTARNCRAPRKKGCWKCGKEGHQMKDCTERQANFLGKIWPSHKGRPGNFLQNRPEQNRPEPSAPPAESFGFGEEIAPSPKQEPKEKELYPLASLKSLFGSDP

SEQ ID NO: 441 - protein, 496 aa, Artificial Sequence
  HIV Gag
MGARASVLSGGKLDSWEKIRLRPGGKKKYRLKHLVWASRELERFALNPSLLETGEGCQQLMGQLQPALGTGTEELRSLYNTLATLYCVHHRIEIKDTKEALDKIEEIQNKSKQKKQQAAADTGNSSNVSQNYPIVQNAQGQMVHQPVSPRTLNAWVKVVEEKAFSPEVIPMFSALSEGATPQDLNMMLNIVGGHQAAMQMLKDTINEEAAEWDRLHPVQAGPIAPGQMRDPRGSDIAGTTSTLQEQIGWMTGNPPIPVGDIYRRWIILGLNKIVRMYSPVSILDIKQGPKEPFRDYVDRFFKALRAEQATQEVKGWMTDTLLIQNANPDCKSILRALGTGATLEEMMTACQGVGGPSHKARVLAEAMSQVQQTNVMMQRSNFKGQKRIKCFNCGKEGHLARNCRAPRKKGCWKCGREGHQMKDCTERQANFLGKIWPSSKGRPGNFLQSRPEPTAPPAESFGFGEEIAPSPKQEPKEKEKELYPLTSLKSLFGSDP

SEQ ID NO: 442 - protein, 494 aa, Artificial Sequence
  HIV Gag
MGARASVLSGGKLDAWEKIRLRPGGKKKYRLKHLVWASRELERFALNPSLLETGEGCKQIMGQLQPALGTGTEELRSLYNTVAALYCVHLRIEVKDTKEALDKVEEIQNKSKKQQAAADSGNSNKVSQNYPIVQNAQGQMVHQAMSPRTLNAWVKVIEEKAFSPEVIPMFSALSEGATPQDLNMMLNIVGGHQAAMQMLKDTINEEAAEWDRVHPVHAGPAPPGQMREPRGSDIAGTTGNLQEQIGWMTGNPPIPVGEIYRRWIILGLNKIVRMYSPVSILDIRQGPKEPFRDYVDRFFKTLRAEQASQEVKNWMTETLLVQNANPDCKSILRALGVGATLEEMMTACQGVGGPSHKARVLAEAMSQAQHTNIMMQRGNFKGQKRIKCFNCGKEGHLARNCRAPRKKGCKCGKEGHQMKDCTERQANFLGKIWPSSKGRPGNFLQSRPEPTAPPAESFGFGEETTPSPKQEPKEKELYPITSLKSLFGSDPLSQ

SEQ ID NO: 443 - protein, 501 aa, Artificial Sequence
  HIV Gag
MGARASVLSGGKLDAWEKIRLRPGGKKKYKLKHIVWASRELERFALNPGLLETSEGCKQIMEQLQPALKTGSEELRSIYNTVATLYCVHKRIEIKDTKEALDKIEEEQNNSKKRAQQAAAGTGNSSQVSQNYPIVQNLQGQMVHQALSPRTLNAWVKVIEEKAFNPEVIPMFSALSEGATPQDLNTMLNTVGGHQAAMQMLKETINEEAAEWDRLHPVQAGPVAPGQMREPRGSDIAGTTSTLQEQIGWMTSNPPIPVGEIYKRWIILGLNKIVRMYSPVSILDIRQGPKEPFRDYVDRFYKTLRAEQASQEVKNWMTETLLVQNANPDCKTILKALGPGATLEEMMTACQGVGGPSHKARVLAEAMSQATSASAAIMMQKSNFKGTRKIVKCFNCGKEGHIARNCRAPRKKGCWKCGKEGHQMKDCTERQANFLGKIWPSHKGRPGNFLQSRPEPTAPPAEFGFGEEITPSQKQEQKDKDKELYPLASLKSLFGNDPLSQ

SEQ ID NO: 444 - protein, 500 aa, Artificial Sequence
  HIV Gag
MGARASVLSGGKLDKWEKIRLRPGGKKKYRLKHIVWASRELERYALNPGLLETSEGCKQIIGQLQPAIQTGTEELRSLYNTVATLYCVHKGIDVKDTKEALEKMEEEQNKSKKKAQQAAADTGNNSQVSQNYPIVQNLQGQMVHQAISPRTLNAWVKVIEEKAFSPEVIPMFSALSEGATPQDLNTMLNTVGGHQAAMQMLKETINEEAAEWDRLHPVHAGPIAPGQMREPRGSDIAGTTSTLQEQIAWMTSNPPIPVGEIYKRWIIVGLNKIVRMYSPVSILDIRQGPKEPFRDYVDRFYKTLRAEQASQDVKNWMTETLLVQNANPDCKTILKALGPQATLEEMMTACQGVGGPSHKARVLAEAMSQATNSVTTAMMQRGNFKGPRKIIKCFNCGKEGHIAKNCRAPRKKGCWRCGKEGHQLKDCTERQANFLGRIWPSHKGRPGNFLQSRPEPTAPPAESFGFGEEITPSQKQEQKDKELYPLTSLKSLFGNDPLSQ

SEQ ID NO: 445 - protein, 497 aa, Artificial Sequence
  HIV Gag
MGARASVLSGGKLDTWERIRLRPGGKKKYALKHLIWASRELERFTLNPGLLETSEGCKQIIGQLQPSIQTGSEEIRSLYNTVATLYCVHERIEVKDTKEAVEKMEEEQNKSKKKTQQAAADSSQVSQNYPIVQNLQGQMVHQAISPRTLNAWVKVIEEKAFSPEVIPMFSALSEGATPQDLNTMLNTVGGHQAAMQMLKETINDEAAEWDRLHPVHAGPVAPGQMREPRGSDIAGTTSTLQEQIAWMTSNPPIPVGEIYKRWIILGLNKIVRMYSPVSILDIRQGPKEPFRDYVDRFYKTLRAEQASQDVKNWMTETLLVQNANPDCKTILKALGPQATLEEMMTACQGVGGPGHKARVLAEAMSQVTGSATAVMMQRGNFKGPRKSIKCFNCGKEGHTAKNCRAPRKKGCWKCGREGHQMKDCTERQANFLGKIWPSHKGRPGNFLQSRPEPTAPPAESFGFGEEITPSQKQEQKDKELYPLASLKSLFGNDPSSQ

SEQ ID NO: 446 - protein, 502 aa, Artificial Sequence
  HIV Gag
MGARASVLSGGKLDEWEKIRLRPGGKKKYRLKHLVWASRELERFALNPGLLETSEGCRQIIRQLQPSIQTGSEEIKSLYNTVVTLYCVHERIKVASTKEALDKIEEEQAKSKKKAQQATADTRNSSQVSQNYPIVQNLQGQMVHHPLSPRTLNAWVKVIEEKAFNPEVIPMFSALSEGATPQDLNTMLNTVGGHQAAMQMLKDTINEEAAEWDRLHPVHAGPVAPGQLREPRGSDIAGTTSNLQEQIGWMTSNPPIPVGEIYKRWIILGLNKIVRMYSPVSILDIRQGPKEPFRDYVDRFYKTLRAEQASQDVKNWMTETLLVQNANPDCKTILKALGPAATLEEMMTACQGVGGPSHKARVLAEAMSQATNANTAIMMQRGNFKGPKKIIKCFNCGKEGHTAKNCRAPRKKGCWKCGREGHQMKDCTERQANFLGKIWPSHNGRPGNFLQSRPPAEPTAPPAEIFGLGEEITPPQKQEQKDKELYPLTSLKSLFGNDPLSQ

SEQ ID NO: 447 - protein, 491 aa, Artificial Sequence
  HIV Gag
MGARASILSGGKLDEWEKIQLRPGGKKRYKMKHLIWASRELERFALDPGLLETSEGCQKIIRQLQPSLQTGSEELKSLFNTVAVLYYVHQRAGVTDTKEALDKLEEEQNKSQQKTQQAAADKGVSQNYPIVQNLQGQMVHQSLSPRTLNAWVKVIEEKAFSPEVIPMFSALSEGATPTDLNTMLNTVGGHQAAMQMLKDTINEEAAEWDRLHPVHAGPAPPGQMREPRGSDIAGTTSTLQEQIQWMTGNPPVPVGDIYKRWIILGLNKIVRMYSPVSILDIKQGPKEPFRDYVDRFFKVLRAEQASQDVKGWMTDTLLVQNANPDCKTILKALGTGATLEEMMTACQGVGGPSHKARVLAEAMSQANSAIMMQKSNFKGQRRVVKCFNCGKEGHIARNCRAPRKKGCWKCGREGHQMKDCTERQANFLGKIWPSNKGRPGNFLQSRPEPTAPPAESFGFREEITPSPKQEQKDGELYPPLASLKSLFGNDP

SEQ ID NO: 448 - protein, 492 aa, Artificial Sequence
  HIV Gag
MGARASVLSGGKLDAWEKIRLRPGGKKKYRLKHLVWASRELERFALDPGLLETSEGCRKIIGQLQPSLQTGSEELKSLYNTIAVLYYVHQKVEVKDTKEALEKLEEEQNKGRQKTQQATAEKGVSQNYPIVQNLQGQMVHQSLSPRTLNAWVKVIEEKAFSPEVIPMFSALSEGATPQDLNTMLNTVGGHQAAMQMLKDTINEEAAEWDRLHPTQAGPIPPGQIREPRGSDIAGTTSTLQEQIQWMTGNPPVPVGEMYKRWIILGLNKIVRMYSPVGILDIRQGPKEPFRDYVDRFFKTLRAEQATQEVKGWMTDTLLVQNANPDCKTILKALGPGATLEEMMTACQGVGGPSHKARVLAEAMSQATNTAIMMQKSNFKGQRRIVKCFNCGKEGHIAKNCRAPRKKGCWKCGREGHQMKDCTERQANFLGKIWPSNKGRPGNFIQNRPEPSAPPAESFRFGEETTPSPKQEQKDEGLYPPLASLKSLFGNDP

SEQ ID NO: 449 - protein, 493 aa, Artificial Sequence
  HIV Gag
MGARASVLSGGKLDAWEKIRLRPGGKKQYRIKHLVWASRELERFAIDPGLLETSEGCQKIIAQIQPSIQTGSEELRSLYNTIAVLYFVHQKIEVKDTKEALDKLEEEQNKSQQKTQQAAAAADKGVSQNYPIVQNLQGQMVHQAISPRTLNAWVKVIEEKAFSPEVIPMFSALSEGATPQDLNTMLNTVGGHQAAMQMLKDTINEEAAEWDRLHPVHAGPIPPGQMREPRGSDIAGTTSTLQEQIQWMTSNPPVPVGDIYKRWIILGLNKIVRMYSPVSILDIRQGPKEPFRDYVDRFFKALRAEQATQEVKGWMTDTLLVQNANPDCKIILKGLGIGATLEEMMTACRGVGGPGHKARILAEAMSQANTTIMMQKSNFRGQRRIVKCFNCGKEGHIARNCRAPRKKGCWKCGQEGHQMKDCTERQANFLGKIWPSNKGRPGNFLQSRPEPTAPPAESLGIREEVTPSPRQEQKEEGQYPPLASLKSLFGNDP

SEQ ID NO: 450 - protein, 494 aa, Artificial Sequence
  HIV Gag
MGARASVLSGGKLDAWERIRLRPGGKKKYRMKHLVWASRELERFAVDPGLLETPEGCKQIIRQLQPSLQTGSEELRSLFNTVAVLYCVHQKIEIKDTKEALEKLEEEQNKGQQKTQQAAADKGVSQNYPIVQNLQGQMVHQPISPRTLNAWVKVIEEKAFSPEVIPMFSALSEGATPQDLNTMLNTVGGHQAAMQMLKDTINEEAAEWDRLHPAHAGPILPGQMREPRGSDIAGTTSTLQEQIQWMTSNPPVPVGDIYKRWIILGLNKIVRMYSPVSILDIRQGPKEPFRDYVDRFFKTLRAEQASQEVKNWMTESLLVQNSNPDCKTILKALGPGATLEEMMTACQGVGGPGHKARVLAEAMSQATNAAIMMQKSNYKGPRRFIKCFNCGKEGHIAKNCRAPRKKGCWKCGKEGHQMKDCTERQANFLGKIWPSNKGRPGNFLQNRPEPTAPPAESFGFKEEITPSPKQEQKDEGQGLYPPLASLKSLFGSDP

SEQ ID NO: 451 - protein, 496 aa, Artificial Sequence
  HIV Gag
MGARASVLSGGKLDAWEKIRLRPGGKKKYRLKHIVWASRELKRFALNPGLLETTEGCKKIIGQLQPSLQTGSEELKSLFNTIVVLYYVHQKIEVRDTKEALDKLQEEQDKHQQKTQQATADKGVSKGVSQNYPILQNLQGQMVHQSLSPRTLNAWVKVIEEKAFSPEVIPMFSALSEGATPQDLNTMLNTVGGHQAAMQMLKDTINEEAAEWDRLHPVHAGPIPPGQMREPRGSDIAGTTSTLQEQIAWMTSNPPVPVGEIYKRWIILGLNKIVRMYSPVSILDIKQGPKEPFRDYVDRFFKTLRAEQATQEVKGWMTETLLVQNANPDCKTILKALGPGATLEEMMTACQGVGGPSHKARILAEAMSKATGAAIMMQKSNFKGQRRIVKCFNCGKEGHIARNCRAPRKRGCWKCGQEGHQMKDCTERQANFLGKMWPSNKGRPGNFLQNRPEPTAPPAESFGFGEEIAPSPKQEQKDKEQVPPLISLKSLFGSDQ

SEQ ID NO: 452 - protein, 496 aa, Artificial Sequence
  HIV Gag
MGARASVLSGGKLDSWEKIRLRPGGRKKYRLKHLVWASRELERFALNPGLLESANGCRQIIEQIQPALQTGSEELRSLFNTVVTLYWVHQRIEVKDTKEALDKLEEEQKTQKQQKTQQEAAGKGVSQNYPIVQNLQGQMVHQALSPRTLNAWVKVIEEKAFSPEVIPMFTALSEGATPQDLNTMLNTVGGHQAAMQMLKDTINEEAAEWDRLHPVHAGPIAPGQMREPRGSDIAGATSNLQEQIAWMTSNPPVPVGEIYKRWIILGLNKIVRMYSPVSILDIKQGPKEPFRDYVDRFFKTLRAEQATQEVKNWMTDTLLIQNANPDCKTILKALGPGASLEEMMTACQGVGGPAHKARVLAEAMSQATNTAIMMQKGNFKGPRRDVKCFNCGKEGHIAKNCRAPRKKGCWKCGKEGHQMKDCTERQANFLGKIWPSNKGRPGNFLQSRPEPTAPPAESFGFGEEINPSPRQETKDKGQEPPLTSLKSLFGSDPLLQ

SEQ ID NO: 453 - protein, 490 aa, Artificial Sequence
  HIV Gag
MGARASVLSGGKLDAWEKIRLRPGGKKRYRMKHLVWASRELDRFALNPGLLETAEGCQKIMAQLQPALQTGTEEIKSLFNTVATLYCVHQKIEVRDTKEALEEVEKIQKKSQQKENSSSQVSQNYPIVQNAQGQMVHQAISPRTLNAWVKVVEEKAFSPEVIPMFTALSEGATPQDLNTMLNTVGGHQAAMQMLKETINDEAAEWDRLHPQQAGPIAPGQIRDPTGSDIAGATSTLQEQIRWMTSNPPVPVGEIYKRWIILGLNKIVRMYSPVSILDIRQGPKEPFRDYVDRFFKTLRAEQATQEVKSWMTDTLLIQNANPDCKIILKGLGQGATLEEMMTACQGVGGPSHKARVLAEAMSQASGAAAAIMMQKSNFKGPRRTIKCFNCGKEGHLARNCRAPRKKGCWKCGKEGHQMKECTERQANFLGKIWPSNKGRPGNFLQNRPEPTAPPAENFGFGEEIAPSPKQEQKEKELYPLSSLKSLFGNDQ

SEQ ID NO: 454 - protein, 497 aa, Artificial Sequence
  HIV Gag
VGARASVLSGGKLDSWEKIRLRPGGRKKYKLKHIVWASRELGRFALNRDLLETAEGCVQIMKQLQPALTGTEELRSLFNTVATLYCVHQKIEVKDTKEAPEEVEKIQKNSQQEIQQAAKNEGNSNPVSQNYPIVQNAQGQMIHQAISPRTLNAWVKVVEEKAFSPEVIPMFSALSEGATPQDLNTMLNTVGGHQAAMQMLKDTINDEAAEWDRIHPQQAGPIPPGQIREPSGSDIAGTTSTLQEQIRWMTSNPPIPVGEIYKRWIILGLNKIVRMYSPVSILDIRQGPKEPFRDYVDRFFKTLRAEQATQEVKGWMTDTLLVQNANPDCKTILRALGPGATLEEMMTACQGVGGPSHKARVLAEAMSQASGAAAAAIMMQKSNFKGPRRIIKCFNCGKEGHLARNCRAPRKKGCWKCGKEGHQMKECTERQANFLGKIWPSNKGRPGNFLQNRTEPTAPPAESFGFGEEIAPSPKQEPKEKELYPLTSLKSLFGSDP

SEQ ID NO: 455 - protein, 495 aa, Artificial Sequence
  HIV Gag
MGARASVLTGGKLDAWEKIRLRPGGRKSYKIKHLVWASRELERFALNPDLLETAEGCQQIMRQLQPSLQTGTEEIKSLYNAVATLYCVHQRIEVKDTKEALEEVEKIQKKSQEKIQQAAMDKGNSNQVSQNYPIVQNAQGQMVHQAITPRTLNAWVKVVEEKAFSPEVIPMFSALSEGATPQDLNLMLNTVGGHQAAMQMLKDTINEEAAEWDRMHPQQAGPFPPGQIREPRGSDIAGTTSSLQEQITWMTGNPPIPVGEIYKRWIILGLNKIVRMYSPVSILDIRQGPKEPFRDYVDRFFKCLRAEQASQDVKGWMTDTLLVQNANPDCKTILRALGQGASLEEMMTACQGVGGPSHKARVLAEAMSQASGAAAAIMMQRSNFKGPRRTIKCFNCGKEGHLARNCRAPRKKGCWKCGKEGHQMKDCTERQANFLGKIWPSNKGRPGNFLQNRTEPTAPPAESLGFGEEIAPSPKQEMKEKELYPSLKSLFGSDP

SEQ ID NO: 456 - protein, 498 aa, Artificial Sequence
  HIV Gag
MGARASVLSGGKLDAWEKIRLRPGGRKKYRLKHLVWASRELERFALNPDLLETADGCQQILGQLQPALKTGTEDLQSLYNTIAVLYCVHQRIDVKDTKEALGKIEEIQNKNKQRTQQAPAAADKEKDSKISQNYPIVQNAQGQMVHQAISPRTLNAWVKVVEEKAFSPEVIPMFSALSEGATPQDLNAMLNTVGGHQAAMQMLKDTINEEAAEWDRLHPVHAGPIPPGQMREPRGSDIAGTTSTLQEQVAWMTGNPPIPVGDIYKRWIILGLNKIVRMYSPVSILDIKQGPKEPFRDYVDRFFRVLRAEQATQDVKNWMTDTLLVQNANPDCRTILKALGRGASIEEMMTACQGVGGPSHKARVLAEAMSQVTNASAAIMMQKGNFKGPRRTVKCSNCGKEGHIARNCRAPRKKGCWKCGQEGHQMKDCTGRQANFLGKIWPSSKGRPGNFPQKRLEPTAPPAESFGFGEEITPSPRQELKEQEPPLTSLRSLFGNDQ

SEQ ID NO: 457 - protein, 499 aa, Artificial Sequence
  HIV Gag
  MISC_FEATURE (76)..(76): Xaa can be any amino acid
  MISC_FEATURE (149)..(149): Xaa can be any amino acid
MGARASVLSGGRLDTLEKIRLRPGGKKKYRLKHIVWASRELERFALNPGLLESAEGCLQIIEQLRPSIKTGTEELXSLFNTVATLYCVLQRIEVKDTKEALGKIEEIQNKRQQKTQQATANKERDNKVSQNYPIVQNAQGQMVHQPISXRTLNAWVKVVEEKAFSPEVIPMFSALSEGATPQDLNAMLNTVGGHQAAMQMLKDTINEEAAEWDRLHPVHAGPIPPGQMREPRGSDIAGTTSTLQEQIAWMTGNPSIPVGDIYKRWIILGLNKIVRMYSPVSILDIKQGPKEPFRDYVDRFFKTLRAEQATQEVKNWMTDTLLVQNANPDCKTILRALGQGASIEEMMTACQGVGGPSHKARVLAEAMSQVTNANAAIMMQKSNFKGPRKIVKCFNCGKEGHIARNCRAPRKKGCWKCGREGHQMKDCTERQANFLGKIWPSSKGRPGNFLQSRPEPTAPPAESFGFGEEMTSSPKQELKDKEPPFASLKSLFGNDPLSQ

SEQ ID NO: 458 - protein, 500 aa, Artificial Sequence
  HIV Gag
MGARASVLSGGKLDAWEKIRLRPGGKKKYRLKHLVWASRELERFALNPGLLETPEGCLQIIEQIQPAIKTGTEELKSLFNLVAVLYCVHRKIDVKDTKEALDKIEEIQNKSQQKTQQAAADKEKDNKVSQNYPIVQNAQGQMVHQAISPRTLNAWVKVVEEKAFSPEVIPMFSALSEGATPQDLNAMLNTVGGHQAAMQMLKDTINEEAAEWDRVHPVHAGPIPPGQMREPRGSDIAGTTSTLQEQIAWMTGNPAIPVGDIYKRWIILGLNKIVRMYSPVSILDIKQGPKEPFRDYVDRFFKTLRAEQATQDVKNWMTETLLVQNANPDCKTILRALGQGASIEEMMTACQGVGGPSHKARVLAEAMSQVTNTNTAIMMQKGNFKGQRKFVKCFNCGKEGHIARNCRAPRKKGCWKCGREGHQMKDCTERQANFLGKIWPSSKGRPGNFLQSRPEPTAPPAESFGFGEEMTPSPKQEQLKDKEPPLASLRSLFGSDPLLQ

SEQ ID NO: 459 - protein, 497 aa, Artificial Sequence
  HIV Gag
MGARASILSGGKLDDWEKIRLRPGGKKQYRIKHLVWASRELDRFALNPGLLESAKGCQQILVQLQPALQTGTEEIKSLYNTVATLYCVHQRIEIKDTKEALDKIEEIQNKNKQQTQKAETDKKDNSQVSQNYPIVQNLQGQPVHQALSPRTLNAWVKVIEEKAFSPEVIPMFSALSEGATPQDLNTMLNTIGGHQAAMQMLKDTINEEAAEWDRVHPVHAGPVAPGQVREPRGSDIAGTTSNLQEQIGWMTGNPPIPVGEIYKRWIILGLNKIVRMYSPVSILDIRQGPKEPFRDYVDRFFKALRAEQATQDVKNWMTDTLLVQNANPDCKTILKALGSGATLEEMMTACQGVGGPGHKARVLAEAMSQVTNTNIMMQRGNFRDHKRIVKCFNCGKQGHIAKNCRAPRKKGCWKCGKEGHQMKDCTERQANFLGKIWPSSKGRPGNFLQSRPEPTAPPAESLGFGEEIPSPKQEPKDKELYPLTSLRSLFGSDPLSQ

SEQ ID NO: 460 - protein, 497 aa, Artificial Sequence
  HIV Gag
MGARASILSGGKLDDWEKIRLRPGGKKKYRIKHLVWASRELDRFALNPGLLESAKGCQQILVQLQPALQTGTQEIKSLYNTVATLYCVHQRIEIKDTMEALEKIEEIQNKNKQQAQKAETDKKDNSQVSQNYPIVQNLQGQPVHQALSPRTLNAWVKVIEEKAFSPEVIPMFSALSEGATPQDLNTMLNTIGGHQAAMQMLKDTINEEAAEWDRVHPVHAGPIAPGQVREPRGSDIAGTTSTLQEQIGWMTGNPPIPVGEIYKRWIILGLNKIVRMYSPVSILDIRQGPKEPFRDYVDRFFKALRAEQATQDVKNWMTDTLLVQNANPDCKTILKALGSGATLEEMMTACQGVGGPGHKARVLAEAMSQVTNTNIMMQRGNFRDHKRIVKCFNCGKQGHIAKNCRAPRKKGCWKCGKEGHQMKDCTERQANFLGKIWPSSKGRPGNFLQSRPEPTAPPAESLGLGEEIPSPKQEPKDKELYPLTSLKSLFGSDPLSQ

SEQ ID NO: 461 - protein, 495 aa, Artificial Sequence
  HIV Gag
MGARASVLSGGKLDKWEKIQLRPGGKKKYRLKHLVWASRELERFALNPNLLETVEGCRQIIRQLQPSLQTGSEELRSLFNTVATLYWVHQSIQVRDTKEALDKLEEEQNRTQQKTQQGKADKGVSQNYPIVQNLQGQMVHQALSPRTLNAWVKVIEEKAFSPEVIPMFSALSEGATPQDLNTMLNTVGGHQAAMQMLKDTINEEAAEWDRMHPVQAGPIPPGQIREPRGSDIAGTTSTLQEQITWMTSNPPIPVGEIYKRWIILGLNKIVRMYSPVSILDIRQGPKEPFRDYVDRFFRVLRAEQATQEVKNWMTETLLVQNANPDCRTILKALGSGATLEEMMTACQGVGGPGHKARVLAEAMSQVTNSAVMMQRGNFKGQRRIIKCFNCGKEGHLARNCRAPRKKGCWKCGKEGHQMKDCSERQANFLGKFWPLNKERPGNFLQNRPEPTAPPAESFGFGEKITPSLRQEMKDQEQGPPLTSLKSLFGSDPLSQ

SEQ ID NO: 462 - protein, 495 aa, Artificial Sequence
  HIV Gag
MGARASVLSGGKLDAWEKIRLRPGGKKKYKLKHLVWASRELERFALNPGLLETTEGCRQIITQIQPSIQTGSEEIKSLYNTIAVLYFVHQKIEVKDTKEALDKLEEEQNKSQRKTQQEAADKGVSQNYPIVQNLQGQMVHQALSPRTLNAWVKVIEEKAFSPEVIPMFTALSEGATPQDLNTMLNTVGGHQAAMQMLKDTINDEAAEWDRLHPVHAGPIPPGQMREPRGSDIAGTTSTLQEQIAWMTSNPPVPVGEIYKRWIILGLNKIVRMYSPVSILDIRQGPKEPFRDYVDRFFKTLRAEQATQEVKNWMTDTLLVQNANPDCKTILKALGPGASLEEMMTACQGVGGPSHKARILAEAMSQVTNPVVMMQKGNFKGHRKIVKCFNCGKEGHIARNCRAPRKKGCWKCGKEGHQMKDCTERQANFLGKIWPSHKGRPGNFLQSRPEPTAPPAESFGFGEEITPSPRQETKDKEQSPPLTSLKSLFGNDPLSQ

SEQ ID NO: 463 - protein, 512 aa, Artificial Sequence
  HIV Gag
MGARASVLTGGKLDQWESIYLRPGGKKKYRMKHLVWASRELERFACNPGLMDTADGCAKLLNQLEPALKTGSEELRSLYNALAVLYCVHSRIQIHNTQEALDKIKEKQEQHKPEPKNPEAGAAAATDSNISRNYPLVQTAQGQMVHQPLTPRTLNAWVKVIEEKAFSPEVIPMFMALSEGATPSDLNTMLNTVGGHQAAMQMLKEVINEEAADWDRTHPVPVGPLPPGQLRDPRGSDIAGTTSTLAEQVAWMTANPPVPVGDIYRRWIVLGLNRIVRMYSPVSILEIKQGPKEPFRDYVDRFYKTLRAEQATQEVKNWMTETLLVQNANPDCKQLLKALGPGATLEEMMTACQGVGGPAHKARVLAEAMSQVQQPTTSVFAQRGNFKGIRKPIKCFNCGKEGHLARNCKAPRRGGCWKCGQEGHQMKDCKNEGRQANFLGKSWSPFKGRPGNFPQTTTRKEPTAPPLESYGFQEEKSTQGKEMQENQERTENSLYPPLTSLRSLFGNDPSSQ

SEQ ID NO: 464 - protein, 498 aa, Artificial Sequence
  HIV Gag
MGASASVLTGSKLDAWEQIRLKPGSKKKYRLKHLVWASRELERFACNPELLETAEGNEKLLQQLEPALKTGSDSLQSLWNAIVVLWCVHNRYKIGDTQQAIQKLKEVMGSRKSADAAKEDTSARQAGQNYPIVSNAQGQMVHQAISPRTLNAWVKAVEEKAFNPEIIPMFMALSEGAISYDINTMLNAIGGHQGALQVLKEVINEEAVEWDRTHPPPVGPLPPGQIREPTGSDIAGTTSTQQEQIHWTTRPNQPIPVGDIYRKWIVLGLNKMVKMYSPVSILDIKQGPKEPFRDYVDRFYKTLRAEQATQEVKNWMTETLLVQNANPDCKQILKSLGPGATLEEMMVACQGVGGPTHKARVLAEAMATAQQDLKGGYTAVFMQRGQNPIRKGTIKCFNCGKEGHIARNCRAPRKKGCWKCGQEGHQMKDCRNGKQANFLGKYWPPGGTRPGNYVQRPAHPSAPPMEEEVKGQENQEQKGGPNELYPFASLKSLFGTDQ

SEQ ID NO: 465 - protein, 498 aa, Artificial Sequence
  HIV Gag
MGARASVLTGSKLDAWERIRLRPGSKKAYRLKHLVWASRELERYACNPGLLETAEGTEQLLQQLEPALKTGSEDLKSLWNAIAVLWCVHNRFDIRDTQQAIQKLKEVMASRKSAEAAKEETSPRQTSQNYPIVTNAQGQMVHQAISPRTLNAWVKAVEEKAFNPEIIPMFMALSEGAVPYDINTMLNAIGGHQGALQVLKEVINEEAAEWDRTHPPAMGPLPPGQIREPTGSDIAGTTSTQQEQIIWTTRGANSIPVGDIYRKWIVLGLNKMVKMYSPVSILDIRQGPKEPFRDYVDRFYKTLRAEQATQEVKNWMTETLLVQNSNPDCKQILKALGPEATLEEMMVACQGVGGPTHKAKILAEAMASAQQDLKGGYTAVFMQRGQNPNRKGPIKCFNCGKEGHIAKNCRAPRKRGCWKCGQEGHQMKDCKNGRQANFLGKYWPPGGTRPGNYVQKQVSPSAPPMEEAVKEQENQSQKGDQEELYPFASLKSLFGTDQ

SEQ ID NO: 466 - protein, 497 aa, Artificial Sequence
  HIV Gag
MGARASVLTGSKLDAWEQIRLKPGCKKKYRLKHLVWASRELDRSACNPELLETAEGNEKLLQQLEPALKTGSESLQSLWNTIAVLWCVHNRIKVEDTQQAIQKLKEVMGSRKSAGTAKEDTSARQTGQNYPIVTNAQGQMVHQSLSPRTLNAWVKAVEEKAFNPEIIPMFMALSEGAIPYDTNTMLNAIGGHQGALQVLKEVINEEAAEWDRTHPPAAGPLPVGQIREPTGSDIAGTTSTQQEQVHWITRPNQPIPVGDIYRKWIVLGLNKVVKMYSPVSILDIRQGPKEPFRDYVDRFYKTLRAEQATQEVKNWMTETLLVQNANPDCKQILKSLGPGATLEEMMIACQGVGGPTHKARVLAEAMAAAQDLKGGYTAVFMQRGQNPSRKGPIKCFNCGKEGHLARNCRAPRKKGCWKCGQEGHQMKDCKNGRQANFLGKYWPPGGTRPGNYAQRQVSPSAPPMTEEMKGQENQEQKEDQNELYPFASLRSLFGTDQ

SEQ ID NO: 467 - protein, 497 aa, Artificial Sequence
  HIV Gag
MGARASVLSGSKLDTWEQIRLKPGCKKKYRLKHLVWASRELERFACNPELLETAEGNEELLQQLEPALKTGSESLQSLWNTIAVLWCVHKRFKVEDTQQAIQKLKEVMGSRKSAGAAKEDTSARQTGQNYPVVANAQGQMVHQSLSPRTLNAWVKAVEEKAFNPEIIPMFMALSEGAIPYDTNTMLNAIGGHQGALQVLKEVINEEAAEWDRTHPQAAGPLPPGQIREPTGSDIAGTTSTQQEQVHWITRPNQPIPVGDIYRKWIVLGLNKVVKMYSPVSILDIRQGPKEPFRDYVDRFYKTLRAEQATQEVKNWMTETLLVQNANPDCKQILKSLGPGATLEEMMIACQGVGGPTHKARVLAEAMSAAQDLKGGYSAVFMQRGQNPGRKGPIKCFNCGKEGHLARNCRAPRKKGCWKCGQEGHQMKDCRNGKQANFLGKYWPPGGTRPGNYAQRQVSPSAPPMTEEMKGQENQEQKGDQNELYPFASLKSLFGTDQ

SEQ ID NO: 468 - protein, 499 aa, Artificial Sequence
  HIV Gag
MGARASVLSGGKLDAWEKIRLRPGGRKKYRLKHLVWASRELEKFAINPGLLETAEGCQQIIGQLQPALQTGSEELKSIYNLVATLYCVHQRIEVKDTKEALDKIEEVQNKGKQKAQQAAADKGSNSQVSQNYPIVQNMQGQMVHQAISPRTLNAWVKVIEEKAFSPEVIPMFSALSEGATPQDLNTMLNTVGGHQAAMQMLKDTINEEAADWDRLHPVHAGPIPPGQMREPRGSDIAGTTSTLQEQIGWMTSNPPIPVGDIYKRWIILGLNKIVRMYSPVSILDIKQGPKEPFRDYVDRFFKVLRAEQSSQEVKNWMTDTLLIQNANPDCKTILKALGTGATLEEMMTACQGVGGPSHKARVLAEAMSQTNTAIMMQRGNFKGPRRIVKCFNCGKEGHIAKNCRAPRKKGCWKCGREGHQMKDCTERQANFLGKIWPSNKGRPGNFLQNRPEPTAPPAESFGFGEETTPSPKQEPRDKESLYPPLTSLKSLFGSDPSLQ

SEQ ID NO: 469 - protein, 846 aa, Artificial
  HIV Env
MRVMGIMRNCQQWWIWVILGFWMLMVCNVIGNLWVTVYYGVPVWREAKTTLFCASDAKAYDREVHNVWATHACVPTDPNPQELVLENVTENFNMWKNYMVDQMHEDIISLWDQSLKPCVKLTPLCVTLNCINVTNATNVTNADYKNCSFNITTELRDKRKKEYALFYRLDIVQLGENNANSEYRLINCNTSTITQACPKVNFDPIPIHYCAPAGYAILKCNTKTFDGTGPCTNVSTVQCTHGIKPVVSTQLLLNGSLSEEGIVIRSENITNNAKTIIVHLNESVEIVCTRPGNNTRRSVRIGPGQTFYATGDIIGNIRQAHCNISKTKWNKTLSRIGEKLKEHFPNKTIRFNSSAGGDLEITTHSFNCRGEFFYCNTTRLFNGTYNSTGDTNSTNSTITLQCRIKQIINMWQGVGKAMYAPPIAGNIICKSNITGLLLTRDGGEENTTETFRPAGGDMRDNWRSELYKYKVVEIKPLGIAPTSAKRRVVEREKRAVGIGAVFLGFLGAAGSTMGAASITLMVQARQLLSGIVQQQNNLLRAIEAQQHMLQLTVWGIKQLQTRVLAIERYLKDQQLLGIWGCSGKLICTTAVPWNASWSNKSEGDIWNNMTWMQWDREISNYTNTIYRLLENSQIQQEQNEKDLLALDSWKNLWSWFDISNWLWYIKIFIMIVGGLIGLRIIFAVLSIVNRVRQGYSPLSFQTLTPNQRGPDRLGGIEEEGGEQDRDRSIRLVSGFLALFWDDLRSLCLFSYHRLRDFILVAARAVELLGRSSLKGLQRGWEILKYLGILVQYWGLELKKSAISLFDTIAIAVAEGTDRIIEAIQRICRAICNIPRRIRQGFEAALQ

SEQ ID NO: 470 - protein, 849 aa, Artificial
  HIV Env
MRVREILRNCQQWWTWGSLGFWMVMIYSVVGELWVTVYYGVPVWKEAKTTLFCASDAKAYEKEVHNVWATHACVPTDPNPQEIVLGNVTENFNMWKNDMVDQMHEDVISLWDQSLKPCVKLTPLCITLNCTSINGTHKVTNDTLYGEIKNCSFNVTTEIRDKKRKEHALFYRLDIVPLDEKDKSSNSNYRLINCNTSAVTQACPKVSFEPIPIHYCAPAGYAILKCNNKTFNGTGPCHNVSTVQCTHGIKPVVPTQLLLNGSLAEEEIIIRSEALTNNAKTIIARLNKSVEIECTRPNNNTRKSIRIGPGQTFYATGDIIGDIREAHCNINKEKWNSTLQGVREKLEKHFPNKNITFEPSSGGDLEITTHSFNCRGEFFYCDTSNLFNKTRRDNANETITLPCRIKQIINMWQEVGRAMYAPPIEGNITCKSNITGLLLVRDGGKTEDNKSEIFRPGGGDMRDNWRSELYKYKVVEIKPLGVAPTEAKRRVVEREKRAVGIGAVLLGFLGAAGSTMGAASITLTVQARQVLSGIVQQQSNLLRAIEAQQHMLQLTVWGIKQLQTRVLAIERYLKDQQLLGLWGCSGKLICTTSVHWNSSWSNKSQKEIWDNMTWMQWDKEISNYTDTIYRLLEESQSQQERNERDLLALDSWKNLWSWFDISNWLWYIKIFIMIVGGLIGLRIIFAVLSIVNRVRQGYSPLSFQTLIPNPRGPDRLGRIEEEGGEQDKDRSIRLVSGFLALVWDDLRRLCLFSYHRLRDFILVATRAVELLGHSSLRGLQRGWEALKYLGNLVLYWGLELKKSAISLLDSIAIAVAEGTDRILEAVQRIWGAIRNIPRRIRQGFEAALQ

SEQ ID NO: 471 - protein, 849 aa, Artificial
  HIV Env
MRAMGTQRNCRQWWIWGILGFWMLMTCSGVGEMVTVYYGVPVWKEAKTTLFCASDAKAYEREVHNVWATHACVPTDPDPQEMVLENVTENFNMWKNDMVDQMHEDIISLWDQSLKPCVKLTPLCVTLNCTNYNNTEGNTTYGGEMRNCSFNITTELRDKKRQESALFYRLDIVPLNGSERNKSEYRLINCNTSAITQACPKVSFDPIPIHYCAPAGYAILKCNNKTFNGTGPCNNVSTVQCTHGIKPVVSTQLLLNGSLAEEEIIIRSENLAKNDKTIIVHLNESVEIVCTRPFNNTRKSIRIGPGQTFYATGDVIGDIRQAHCNTSEQKWNKTLEQVGKKLAEHFPNKTIIFNSSSGGDLEITTHSFNCGGEFFYCNTSRLFNSTYNPNSTYIEGRSNATITLQCRIKQIINLWQEVGRAIYAPPIAGNITCKSNITGLLLTRDGGNNSTTEIFRPQGGNMKDNWRSELYKYKVVEVKPLGVAPTKAKRRVVEREKRAVGIGAVFLGFLGAAGSTMGAASMTLTVQARQLLSGIVQQQSNLLRAIEAQQHMLQLTVWGIKQLQARVLAIERYLKDQQLLGIWGCSGKLICTTAVPRNNSWSNKTLGDIWENMTWMQWDREISNYTDTIYRLLEVSQNQQEKNEKDLLALDSWKNLWSWFDISNLWYIRIFIMIVGGLIGLRIVFAVLSLVNRVRQGYSPLSFQTLTPSPREPDRLGRIEEEGGEQDKDRSIRLVGGFLALAWDDLRSLCLFSYHRLRDFILIAARTVELLGRSSLRGLQRGWEILKYLGSLVQYWGLELKKSAISLLDTIAIAVAEGTDRIIELIQRICRAIYNIPRRIRQGFEAALQ

SEQ ID NO: 472 - protein, 853 aa, Artificial
  HIV Env
MRVMGILRSCQQWWIWGILGFWMLMICSVLGNLWVTVYYGVPVWREAKTTLFCASDAKAYEKEVHNVWATHACVPTDPNPQEMYLVNVTENFNMWKNDMVDQMHEDIISIWDQSLKPCVKLTPLCVTLYCTNVTKRVITYNNNMTEEMKNCSFNTTTELRDKKTKERALFYRLDIVPLNESDNNSYREYRLINCNTSTITQACPKVTFDPIPIHYCAPAGYAILKCNNETFNGTGPCNNVSTVLCTHGIKPVVSTQLLLNGSLSEGEIMIRSENLTDNAKTIIVQLNKPVEIVCTRPGNNTRKSVRIGPGQTFYATGDIIGDIRQAHCNISNSNWNSTLQQVARKLEKYFPNKTIKFQPSSGGDLEITTHSFNCRGEFFYCYTTKLFNSTYNSTYTGSESNITIPCRIKQIINMWQGVGQAMYAPPIAGNITCRSNITGLLLTRDGGINEDDNNTEIFRPGGGNMRDNWRSKLYKYKVVEIKPLGVAPNKAKRRVVEREKRAVGLGAVFLGFLGAAGSTMGAASITLTVQARQLLSGIVQQQNNLMRAIEAQQHMLQLTVWGIKQLQARVLALERYLQDQQLLGIWGCSGKLICTTPVPWNSSWSNKSVDDIWKNMTWMEWDKEINNYTKIIYNLLEKSQKQQEKNEQELLALDSWENLWNWFSISRWLWYIKIFIMIVGGLIGLRIIFAVLSVVNRVRQGYSPLSFQTLIPNPRGPDRLERIEEEGGEQDRGRSVRLVSGFLTLAWDDLRSLCIFLYRLLSDFISIAARTVNLLGQNSLRGLQRGWEALKYLGSLGQYWGQELKKSAINLFDTIAIAVAEGTDRIIEAVQRAVRAILHIPRRIEQTFEPPLL

SEQ ID NO: 473 - protein, 833 aa, Artificial
  HIV Env
MRVMGIQRNCQRWWIWGILGFWMIYNVVGNLWVTVYYGVPVWKEAKTTLFCASDAKAYDREVHNVWATHACVPTDPNPQEIGLENVTENFNMWKNDMVNQMHEDIISLWDQSLKPCVRLTPLCVTLNCNNVTTYNGTYSDGMKSCSFNITTELRDKRRKEYAIFHSLDIVPLENSENSEYRLIKCNTSTITQACPKVNFDPIPIHYCAPAGYAILKCRNKTFNGTGPCNNVSTVQCTHGIKPVVSTQLLLNGSLAEEEIVIRSENITNNAKIIIVHLNETVDIVCTRPNNNTRKSMRIGPGQTFYATGDIIGNIREAHCNISKTKWENTLHMVSEKLKENFPNKTIVFNSSAGGDLEITTHSFNCRGEFFYCNTSKLFNGTYNSNNNTADITLQCRIKQIINLWQGVGRAMYAPPIAGNITCKSNITGLLLTRDGGGENNSTETFRPAGGEMRDNWRSELYKYKVVEVKPLGIAPTEAKRRVVQREKRAVGIGAVFLGFLGAAGSTMGAASITLTVQARQLLSGIVQQQNNLLRAIEAQQHMLQLTVWGIKQLQARVLAIERYLRDQQLLGIWGCSGKLICTTNVPWNSSWSTRNYSDIWNNMTWMQWDREIDNYTDIIYRLLEESQNQQEKNEKDLLALDSWNSLWNWFDITNWLWYIKIFIMIVGGLIGLRIIFAVLSIVNRVRQGYSPLSFQTLTPNPRELDRLGRIEEEGGEQDRDRSIRLVSGFLALAWDDLRSLCLFSYHRLRDFTLIAARAVETLGRRGWEALKYLGSLVQYWGLELKKSAVSLLDTIAIAVAEGTDRILEVTQRICRVIRNIPRRIRQGVEAALQ

SEQ ID NO: 474 - protein, 857 aa, Artificial
  HIV Env
MRVKGIQRNWPQWWIWGSLGFWMLMFYSVMGNLWVTVYYGVPVWKEAKTTLFCASDAKAYEKEVHNIWATHACVPTDPNPQEIVLENVTENFNMWKNDVVDQMHEDIISLWDQSLKPCVKLTPLCVTLQCSNVSRDATSSSSEGMREGMREIKNCSFNVTTELRDKRKNVYALFYKLDIVPLEENDISTYRLINCNTSSISQACPKVSFGPIPIHYCAPAGYAILKCNNKTFNGTGPCQNVSTVQCTHGIKPVVSTQLLLNGSLAEGEIIIRSENMTDNVKPIIVHLNESVEINCTRPNNNTRKSIRIGPGQTFYATGAIIGDIRQAYCTVNASKWNETLQKVKKKLGEHFPDKNITFESPSGGDLEITTHTFNCRGEFFYCNTSNLSNETYLANLTSNVTKNATITLPCRIKQIINMWQEVGRAIYAPPIAGKITCISNITGTLLTRDGGVSNTTEGNETFRPGGGDMRNNWRSELYKYKVVEIRPLGVAPTEARRRVVEREKRAVGIGAVLLGFLGAAGSTMGAASMTLTVQARQLLSGIVQQQSNLLRAIEAQQHMLQLTVWGIKQLQTRVLAMERYLKDQQLLGLWGCSGKIICTTNVPWNASWSNKSQEDIWNNMTWMPWDREINNYTRTIYELLEESQSQQEQNEKDLLALDSWKNLWNWFNISNWLWYIKIFIIIVGGLIGLRIIFAVLSIVNRVRQGYSPLSLQTLTPNPRGPDRPRGIEEEGGEQDKDRSIRLVNGFLALAWDDLRSLCLFSYHQLRDFILIVARAVELLGRNSLRGLQRGWEILKYLGSLIQYWGLELKKSAISLLDTIAIAVAGGTDRFIELIQRIYRAIRNVPRRIRQGFETALL

SEQ ID NO: 475 - protein, 845 aa, Artificial
  HIV Env
MRVRGIPRNWQQWWIWGILGFCMIITCKVVGNLWVTVYYGVPVWRETKTTLFCASDAKAYDKEVHNVWATHACVPTDPNPQELVLGNVTESFNMWKNDMVDQMHEDIISLWDQSLNPCVKLTPLCVTLKCSNVNKTNFTDTTNGEIKNCSFNITTEVRDRKKNEHALFYRLDIVPLEGENNTNNEYRLINCNTSAVTQACPKVTFDPIPVHYCAPAGYAILKCNNKTFNGAGPCNNVSTVQCTHEIKPVVSTQLLLNGSLAEEQIIIRSENMTNNAKTIIVHLKKPVQIVCTRPNNNTRRSVRIGPGQTFYARGDIIGNIRQAHCNISRGEWNETLMEVSKELRKYFPNKNITFAPSSGGDLEITTHSFNCRGEFFYCNTSNLFNNTYRADNNITNDNSNITLQCRIKQIINMWQEVGRAMYAPPIEGNITCNSSITGLLLTRDGGKNSTNNGTEIFRPGGGDMRDNWRSELYKYKVVKIKPLGIAPTKAQRRVVKREKRAVGIGAVFLGFLGAAGSTMGAASITLTVQARQLLSGIVQQQSNLLRAIEAQQHMLQLTVWGINQLQTRVLAIERYLKDQQLLGIWGCSGKLICTTAVPWNHSWSNKSEEDIWNHTTWMQWDREISNYTDTIYRLLEDSQNQQEINEKDLLALDSWKNLWNWFDITKWLWYIKIFIMIVGGIIGLRIIFAVLSIVNRVRQGYSPSSFQTLIPNPEGPDRLRRIEEEGGEQDRDRSIRLVNGFLALFWDDLRSLCLFSYHRLRDLILVTARAVELLGQRGWEALKYLGSLGQYWGLELKKSAISLLDTIAIAVAEGTDRIIELIQTICRAIRNIPRRIRQGFEAALQ

SEQ ID NO: 476 - protein, 843 aa, Artificial
  HIV Env
MRVREILRSYQHWWMWSILGLWILIISNVVGNLWVTVYYGVPVWKEAKTTLFCASDAKAYEKEVHNVWATHACVPTDPNPQEIPLKNVTENFNMWKNDMVDQMHEDIISLWDQSLKPCVKLTPLCVTLECEDANNGSVTQGEIKNCSFNVTTELRDKIQKVHALFYRLDIVQLDNSSYRLINCNTSAITQACPKVSFDPIPIHYCTPAGYAILKCNNQTFNGTGPCNDVSSVQCTHGIKPVVSTQLLLNGSLAEKEIIIRSENLTNNAKIIIVHLKDPVNITCTRPNNNTRKSIRIGPGQTFYATGDIIGDIRQAHCNISAAQWNKTLQEVGAKLEEHFPNKTIKFNQSSGGDLEITTHSFICRGEFFYCNTSALFNSTYNSTNTSGHNDTRIITLPCRIKQIINMWQKVGRAMYAPPIAGNITCKSNITGLLLTRDGGNTSSTEEIFRPEGGDMRDNWRSELYKYKVVEIKPLGVAPTKAKRRVVEREKRAVGIGAMFLGFLGAAGSTMGAASITLTVQARQLLSGIVQQQSNLLRAIEAQQHLLQLTVWGIKQLQTRVLSIERYLQDQQLLGIWGCSGKLICTTAVPWNSSWSNRSQDDIWENMTWMQWDKEISNYTNTIYNLLEKSQNQQEKNEKDLLALDSWKNLWNWFGITKWLWYIKIFIMIVGGLIGLRIIFAVLSIVNRVRQGYSPLSFQTLTPNPRGPDRLGRIEEEGGEQDRDRSVRLVSGFLALTWDDLRSLCLFCYHRLRDFILIAARVVELLGRSSLRGLQKGWEALKYLGNLVQDWGLELKKSAISLFDAIAIAVAEGTDRIIELIQRTGRAICNIPRRIRQGFEAALQ

SEQ ID NO: 477 - protein, 848 aa, Artificial
  HIV Env
  misc_feature (342)..(342): Xaa can be any naturally occurring amino acid
MRVMGIKRNCPPWWIWGILGFWMLMICNVMGNLWVTVYYGVPVWKEAKTTLFCASDAKAYEKEAHNIWATHACVPTDPNPREMFLENVTQNFNMWKNDMVDQMHEDIISLWDQSLKPCVKLTPLCVTLTCSNLNITNSTAFNTTIKEEMKNCSFNMTTEIRDRKRKEYALFYKLDIVPLEGNNSEYRLINCNTSAITQACPKVSFEPIPIHFCAPAGYAILKCNNKTFNGTGPCNNVSTVQCTHGIKPVVSTQLLLNGSLAEEEIIIRSENLTNNVKTIVVHLNESIQINCTRPGNNTRKSVRIGPGQTFYATGDIIGDIRQAHCNISEKAWNKTLHRVSEXLKEHFPNKTIKFTSPSGGDLEIIQHTFNCGGEFFYCNTSKLFNGTYNGTSISSNSSITLQCRIKQIINMWQGVGQAIYAPPIAGNITCKSNITGLLLTRDGGNNTENTETFRPGGGDMRDNWRNELYKYKVVEIKPLGIAPTSAKRRVVEREKRAVGIGAVFLGFLGAAGSTMGAASITLTVQVRQLLSGIVQQQNNLLRAIEAQQHMLQLTVWGIKQLQARVLAIERYLKDQQLLGIWGCSGKLICTTAVPWNTSWSNKSQNDIWDNMTWMQWDREISNYTGIIYNLLEESQIQQEKNEKDLLALDSWNNLWNWFTITNWLSYIKIFIMIVGGLIGLRIIFAVLSLVNRVRQGYSPLSFQTLIPNPRGPDRLERIEEEGGEQDRDRSIRLVSGFLALAWDDLRSLCLFSYHRLRDFILVTARAVELLGRSSLRGLQRGWEILKYLGTLVQYWVLELKKSAISLLDATAITVAGGTDRIIELIQRIGRAILSIPRRIRQGFEAALQ

SEQ ID NO: 478 - protein, 850 aa, Artificial
  HIV Env
TRVMGIRRNWQQWWIWGILGFWMLIICNVMGNMWVTVYYGVPVWREAKAPLFCASDAKAYDREVHNVWATHACVPTDPNPQEMVLKNVTENFNMWKNDMVEQMHEDIISLWDQSLKPCVKLTPLCVTLDCTNATITDNTIDEGMGNEIKNCSFNTTTELRDKKKREYALFYRLDIVSLDNENNKTAEYRLINCNTSTITQACPKVSFDPIPIHYCAPAGYAILKCNNKTFNGKGPCNNVSTVQCTHGIKPVVSTQLLLNGSLAEGEIIIRSKNLTDNARTIIVHLNESVQIVCTRPNNNTRKSVRLGPGQAFYATGDIIGDIRKAYCTINESKWITTLHRVSEKLKEHFPNKAINFTQPKGGDLEITTHSFTCRGEFFYCNTSELFNGTYNSTGDSNSNLITLQCRIKQIINMWQKVGRAMYAPPIEGNITCISNITGLLLTRDGGYEANHTEIFRPIGGDMRDNWRSELYKYKVVEIKPLGLAPTESKRRVVEREKRAVGIGAVFLGFLGAAGSTMGAASITLTVQARQLLSGIVQQQSNLLRAIEAQQHMLQLTVWGIKQLQTRVLAIERYLKDQQLLGIWGCSGKLICTTAVPWNVSWSNKSYKAIWDNMTWMQWDREISNYTDTIYSLLEDSQNQQEKNEKDLLALDSWKNLWNWFDITNWLWYIKIFIMIVGGLIGLRIIFAVLSIVNRVRQGYSPLSFQTLIPNPRGPDRLGRIEEEGGEQDRDRSIRLVSGFLALAWDDLRSLCLFCYRRLRDFILVTARAVELLGRSSLKGLQRGWEILKYLGSLVQYWGLELKKSAISLLDTVAIAVAEGTDRIIELIQRGYRAICNIPTRIRQGFEAALQ

SEQ ID NO: 479 - protein, 852 aa, Artificial
  HIV Env
MRVRGTLKNYQRWWIWGILGLWILLINIVVGNLWVTVYYGVPVWKEAKTTLFCASDAKGYDREVHNVWATHACVPTDPNPQELVLGNVTENFNMWKNDMVDQMHEDIISLWDESLKPCVKLTPLCVTLNCINATNSNTYNNSIKEEMKNCSFNITTEIRDKKKQVYALFYKPDIVPLDGSNSSEYRLINCNTSALTQACPKVSFDPIPIHYCAPAGYAILKCNNKTFNGTGPCTNVSTVQCTHGIKPVVSTQLLLNGSLAEEDIIIRSENLTDNVKTIIVHLNESVEIVCTRPGNNTRKSIRIGPGQAFFATGEIIGDIRQAHCNISATNWNKTLQMVSEKLQQHFPNKTIKFDKHSGGDLEITTHSFNCRGEFFYCNTSQLFNGTYMPNTYMSSSDNRNITIPCRIKQIINLWQEVGRAMYAPPIAGNITCKSNITGLLLTRDGGGSNTTNATETFRPGGGDMRDNWRSELYKYKVVEVKPLGLAPTEAKRRVVEREKRAVGIGAVFLGFLGAAGSTMGAASMTLTVQARQLLSGIVQQQSNLLKAIEAQQHLLQLTVWGIKQLQARVLAIERYLKDQQLLGIWGCSGKLICTTAVPWNNSWSNKSFTEIWDNMTWMEWDREISNYTNTIYRLLEKSQNQQEINEKDLLALDSWKNLWSWFDISNWLWYIRIFIMIVGGLIGLRIIFAVLSIVNRVRQGYSPLSFQTLIPNPGGPDRLGRIEEEGGEQDRDRSVRLVNGFFALAWDDLRSLCLFCYHRLRDFILVTARAVELLGHSSLKGLQRGWEILKYLGSLVQYWGLELKKSAISLLDTIAIAVGEGTDRIIEIIQRICRAIRNTPRRIRQGFEASLL

SEQ ID NO: 480 - protein, 840 aa, Artificial
  HIV Env
MRVRGIPRNWQQWWIWGILGFWILMICNVVGNLWVTVYYGVPVWKEAKTTLFCASDAKAYEREVHNVWATHACVPTDPNPQEIVLENVTENFNMWKNDMVDQMHEDIISLWDQSLKPCVKLTPLCVTLTCKDYNKNITYDNNEIKNCSFNTTTELRDRKKNVYALFYKIDIVPLNDNNSNNSMYRLINCNTSAITQACPKVSFDPIPIHYCAPAGYAILKCNDKTFNGTGPCQNVSTVQCPHGIKPVVSTQLLLNGSLAEEEIIIRSENIEDNVKTIIVHLNESIEIVCIRPNNNTRKSIRIGPGQTFYATGDIIGNIREAHCNITREEWNKTLQGVEEKLKEHFPNKKITFKPSSGGDLEVTTHSFNCGGEFFYCNTTHLFNGNGESDINITLPCRIKQIINMWQEVGRAMYAPPIAGNITCKSKITGLLLTRDGGKQNESKIFRPGGGDMRNNWRSELYKYKVVEIKPLGLAPTGAKRRVVEREKRAVGIGAVFLGFLGAAGSTMGAASTTLTAQARQVLSGIVQQQSNLLRAIEAQQHMLQLTVWGIKQLQTRVLAIERYLKDQQLLGIWGCSGKLICTTAVPWNSSWSNKSQADIWDNMTWMQWDREISNYTDTIYRLLEDSQIQQEKNEKDLLALDSWKNLWSWFDITNWLWYIRIFIIIVGGLIGLRIIFAVLSIVNRVRQGYSPLSFQTLTPNPRGPDRLGGIEEEGGEQDRDRSIRLVNGFLALAWDDLRSLCLFSYHRLRDCILIAARAVELLGHSSLRGLQRGWEVLKYLGSLVQYWGLELKKSAISLLDTIAIAVAEGTDRIIDLIQRICRAILRIPRRIRQGFEAALL

SEQ ID NO: 481 - protein, 847 aa, Artificial
  HIV Env
MRVTGIMRNCQQWWIWVILGFWMLMICNVIGNLWVTVYYGVPVWKEAKATLFCASEAKAYESEVHNVWATHACVPTDPNPQEIVLENVTENFNMWENGMVDQMHEDIISLWDQSLKPCVKLTPLCVTLNCSNAKANSNASMEGEIENCSFNITTELRDKRKQEYALFYRLDVVPLDSPSNATNSRYRLINCNTSAITQACPKINFDPIPIHYCAPAGYAILKCNNKTFNGTGPCNNVSTVQCTHGIKPVVATQLLLNGSLAEEEIVIRFKNITNNAKIIIVQLNTSVGIVCTRPNNNTKKSMRIGPGQTFYATGDIIGDIRQAHCNISEDVWRKTLFNVSNKLKEYFPKRNITFNSSTGGDLEITTHSFNCRGEFFYCDTTKLFNGTYNSTEQTNSTITLQCRIKQIINMWQGVGRAMYAPPIEGNITCNSNITGLLLTRNRGRENGDNTTETFRPAGGDMRDNWRSELYKYKVVEIKPLGIAPTKAKRRVVEREKRAVGIGAVFLGFLGAAGSTMGAASMTLTVQARQLLSGIVQQQSNLLRAIEAQQHMLQLTVWGIKQLQARVLAIEKYLKDQQLLGMWGCSGKIICTTTVPWNDSWSNKSQEYIWGNMTWMQWDREINNYTNTIYRLLENSQNQREQNEKNLLALDSWKNLNWFSITHLWYIKIFIMIVGGLIGLRIVLVVLSVVNRVRQGYSPLSLQTLSPNQRGLDRLGRIEEEGGEQDRDKSIRLVSGFLALAWDDLRSLCLFSYHRLRDFILVTARAVELLGRSGLKGLQRGWEILKYLGSLIQYWGLELKKSAISLLDTIAIAVAEGTDRIIEGIQRICRIIRNIPTRIRQGFEAALQ

SEQ ID NO: 482 - protein, 839 aa, Artificial
  HIV Env
MRVRGIQRNWQQWWIWGSLGFWVMACSVVGNLWVTVYYGVPVWKEAKTTLFCASDAKAYETEVHNVWATHACVPTDPNPQEMALENVTENFNMWKNDMVDQMHEDIISLWDQSLKPCVKLTPLCVTLKCSDAKGNGNRTGEIKNCSFNVTTELRDKRQQVYALFYRLDVVQLNSEYRLINCNTSAITQACPKVTFDPIPIHYCAPAGYAILKCNNKTFNGTGPCNNVSTVQCTHGIKPVVSTQLLLNGSLAEEGIIIRSENLTDNAKTITVQLDQAVEIECTRPNNNTRKSIRIGPGQTFYATGDIIGNTRQAHCNVSAGAWNKTLQKVGEELRKHFPNKTIQFNSSSGGDLEITTHTFNCRGEFFYCNTSQLFNGTYNDTYESNSGNSTITLPCRIKQIINMWQGVGRAIYAPPIEGNITCKSNITGLLLTRDGGKGNDTAEIFRPEGGDMKNNWRSELYKYKVVEIRPLGVAPTKAKRRVVEREKRAALGAVLLGFLGAAGSTMGAASITLTVQARQLLSGIVQQQSNLLKAIEAQQHLLQLTVWGIKQLQTRVLAIERYLKDQQILGIWGCSGKLICTTSVPWNSSWSNKSLTEIWDNMTWMQWDREISNYTETIYRLLEDSQNQQEKNEKDLLALDSWNNLWNWFSITKWLWYIKIFIIIIGGLIGLRIIFAVLSIVNRVRQGYSPLSLQTLTPNPRELDRLGRIEEEGGEQDRGRSIRLVNGFLPLVWEDLRSLCLFSYHRLRDLILVVARAVELLGRSSLRGLQKGWETLKYLGSLIQYWGLELKKSAISLLDTIAIATAEGTDRIIEVIQRICRVIRNIPTRIRQGFEAALQ

SEQ ID NO: 483 - protein, 851 aa, Artificial
  HIV Env
MRVRGISRNWQQWWIWGILGFWMFMICSVLGNLWVTVYYGVPVWREAKTTLFCASDAKAYETEVHNIWATHACVPTDPNPQEIVLGNVTENFNMWKNDMVDQMHEDIISLWDQSLKPCVKLTPLCVTLNCTNANVTYHNVTYNNTDEVKNCSFNMTTELRDKKQNVYALFYKLDIVPLNGNSGSEYRLINCNTSAITQACPKVSFDPIPIHYCAPAGYAILKCNNKTFNGTGPCQNVSTVQCTHGIRPVVSTQLLLNGSLAEGEIIIRSENLADNAKTIIVHFNESVEIECIRPNNNTRKSIRIGPGQVFYATGDIIGDIREAHCNITESAWNRTLHRVSKKLREHFPNTTIKFQPASGGDLEITTHSFNCRGEFFYCDTSKLFNSSYNDTELYSYNSTANITLPCRLKQIINMWQKVGRGIYAPPIEGSITCNSNITGLLLVRDGGINTSTVETFRPEGGNMRDNWRSELYKYKVVEIKPLGVAPTEAQRRVVEKQKRAVGMGAVFLGFLGAAGSTMGAASITLTVQARQLLSGIVQQQSNLLRAIEAQQHMLQLTVWGIKQLQARVLAIERYLRDQQLLGLWGCSGKLICTTTVPWNSSWSNKSLADIWDNMTWMQWDKEINNYTGIIYKLLEDSQIQQEQNEKDLLALDSWKNLWTWFDISNWLWYIKIFIMIVGGLIGLRIIFAVLSIVNRVRQGYSPLSFQTLTPNPRGLDRLGRIEEEGGEQDRGRSIRLVQGFLALAWDDLRNLCLFSYHQLRDLILVTTRVVELLGRSSLRGLQRGWEALKYLGSLVQYWGLELKKSAISLLDTIAIAVAEGTDRIIELVQRIGRGIYNIPRRIRQGFEAALQ

SEQ ID NO: 484 - protein, 853 aa, Artificial
  HIV Env
MRVMGIMRNWPPWWIWGILGFWMLMICNVMGNLWVTVYYGVPVWREAKATLFCASDAKAYEREVHNVWATHACVPTDPNPQEIVLENVTENFNMWENDMVEQMHEDIISLWDQSLKPCVKLTPLCVTLKCRNANNNASNTYQVTTPTPPDIMKNCSFNIPTELRDKSKKEYALFYKLDIVPLGNTNGTEYRLINCNTSTITQSCPKVTFDPIPIHYCAPAGYAILKCNNETFNGTGPCNNVSTVQCTHGIKPVVSTQLLLNGSLAEKEIIIRSKNITDNVKTIIVHLNEAVEIVCTRPGNNTRKSVRIGPGQTFYATGEVIGDIREAHCNISEEKWNKTLYRVSEKLKEYFPNKTIKFDQPTGGDLEITKHSFNCRGEFFYCNTSQLFNSSYSRHNNTSNSTITLPCNIKQIINMWQGVGRAMYAPPIAGNITCTSNITGLILTRDGGGNETNETETFRPAGGDMRDNWRSELYKYKVVEIKPLGLAPTKAKRRVVEREKRAVGIGAVFLGFLGAAGSTMGAASITLTVQARQLLSGIVQQQSNLLRAIEAQQHMLQLTVWGIKQLQTRVLAIERYLKDQQLLGIWGCSGKLICPTAVPWNASWSNKSHDEIWENMTWMQWDREISNYTDIIYRMLEDSQNQQEKNERDLLALDSWKNLWNWFNISNWLWYIKIFIMIVGGLIGLRIIFAVLSMVNRVRQGYSPLSFQTLTPNPRGPDKLERIEEEGGEQDRNRSIRLVSGFLALAWDDLRSLCLFCYHRLKDFVLVTARVVELLGLSSLKGLQRGWEILKYLGSLVQYWGLELKKSAISLLNTTAIAVAEGTDRVIELLQRIGRAICNIPRRVRQGFETALL

SEQ ID NO: 485 - protein, 850 aa, Artificial
  HIV Env
MRVTGMWKNCQQWWIWGILGFWMLMICSVLGNLWVTVYYGVPVWKEAKTTLFCASDAKAYEREVHNVWATHACVPTDPNPQEMELKNVTENFNMWKNDMVDQMHEDIISLWDESLKPCVKLTPLCVTLNCVTVNCTNNVTSCLCNNTICEQMRNCSFNATTEIRDKKQKVYALFYKLDIVSLDDNNSYRLINCNTSAITQACPKVSFDPIPIHYCAPAGYAILKCNNKTFNGTGPCNNVSIVQCTHGIKPVVSTQLLLNGSLAEEEIIIRSENLTNNAKTIIVHLNDSVEIVCTRPNNNTRKSIRIGPGQAFYATDAIIGDIRQAHCNISRDKWNKTLQQVGEKLAEHFPNKTIKFAPSSGGDLGITTHSFNCRGEFFYCNTSGLFNGTFNGTHSTNTNITLPCRIKQIINMWQEVGRAMYAPPIAGNITCKSNITGILLTRDGGEDTKNKTETFRPGGGDMRDNWRSELYKYKVVEIKPLGVAPTKAKRRVVEREKRAVGIGAVFLGFLGAAGSTMGAASITLTVQTKQLLSGIVQQQSNLLKAIEAQQHLLQLTVWGIKQLQARVLAIERYLKDQQLLGIWGCSGKLICTTAVPWNSSWSNKSQAEIWDNMTWMQWDREISNYTNTIYKLLEDSQLQQENNEKDLLALDSWNNLWNWFDITKWLWYIKIFIMIVGGLIGLRIIFAVLSIVNRVRQGYSPLSFQTLTPNPREPDRLGRIEEEGGEQDRERSIRLVSGFLPLFWDDLRSLCLFSYHRLRDLILIAARAVELLGRSSLRGLQRGWEILKYLGSLVQYWGLELRKSASSLLDTIAIAVAEGTDRIIEVIQIICRAILHIPRRIRQGFEVALL

SEQ ID NO: 486 - protein, 846 aa, Artificial
  HIV Env
MRVRGIPRNWQQWWIWGILGFWMIYSMMGNLWVTVYYGVPVWKEAKAPLFCASDAKAYEKEAHNVWATHACVPTDPNPQEIELKNVTENFNMWKNDMVEQMHEDIIRLWDESLKPCVRLTPLCVTLRCSNAGSGNATANRATHNPMEGEIKNCSFNATTEIKDRKKQVYALFYRLDVVPLDNDSATNYRLINCNTSAITQACPKISFDPIPIHYCAPTGYAILKCNNKTFNGTGPCNNVSTVQCTHGIKPLVSTQLLLNGSLAQQQIMITSENLTNNAKIIIVHLKEAINIVCTRPNNNTRTSIRIGPGHSFFATNGIIGDIRQAHCSISKDAWNETLQQVGKKLEEYFPNKTIKFANSSGGDLEITTHSFNCGGEFFYCNTTILFNSTYYPNTKSDTTETITLPCRIKQIVNMWQGVGRAIYAPPIAGNITCNSSITGLLLLRDGGTETENNRTETFRPGGGDMRDNWRSELYKYKVVEIKPLGVAPTKAKRRVVEREKRAVGMGAVILGFLGAAGSTMGAASITLTVQARQLLFGIVQQQNNLLRAIKAQQHLLQLTVWGIKQLQTRVLAIESYLKDQRLLGIWGCSGKLICTTAVPWNSSWSSRSHEDIWNNLTWMQWDREIDNYTDTIYKLLEESQNQQEQNEKDLLALDRWDSLWNWFGISKWLWYIKIFIMIVGGLIGLRIIFAVLSIVNRVRQGYSPLSFQTLTPNPRGPDRLGRTEEEGGEQDNDRSIRLASGFLAPAWDDLRSLCLFSYHRLRDLILVTARVVELLGRSGWEALKYLGNLVLYWGLELKKSAISLFDTIAVAVAEGTDRILEVIQRICRAIRNIPTRIRQGFEAALL

SEQ ID NO: 487 - protein, 848 aa, Artificial
  HIV Env
MRVRGILKNCQQWWIWIILGFWLLIITNVVGKLWVTVYYGVPVWKEAKTTLFCASDAKAYEKEVHNVWATHACVPTDPNPQEMVLENVTENFNMWKNDMVDQMHEDIISLWDESLKPCVKLTPLCVTLSCNATNKSNSTNVTSENKEGEMKNCSFNITTELINKKQREYALFYKLDIVPLNNSSDNSSGEYRLINGNTSALTQACPKVSFDPIPIHYCTPAGYAILKCNNKTFNGTGPCNNVSTVQCTHGIKPVVSTQLLLNGSLAEEIIIRSENLTNNAKTIIVQLKEPVKINCTRPNNNTRKSIRIGPGQAFYATGDIIGDIRQAHCNISKEEWNKTLREVKGKLGKHFNKTIMFAPSSGGDLEITAHSFNCRGEFFYCNTSLLFDETQLSKENNTINIQCRIKQIINLWQEVGRAMYAPPIEGNITCKSNITGLLLTRDGGTNNNNTETFRPVGGDMRDNWRSELYKYKVVEIKPLGVAPTEAKRRVVKREKRAVGIGAVFLGFLGAAGSTMGAASITLTVQARQLLSGIVQQQSNLLRAIEARRHLLQLTVWGIKQLQTRVLAIERYLKDQQLLGIWGCSGKLICTTAVPWNSSWSNRSKTEIWDNMTWMQWDREISNYTETIYRLLEESQNQQEKNEEDLLALDSWDSLWNWFSITKWLWYIKIFIMIVGGLIGLRIIFAVLSIVKRVRQGYSPLSFQTLTPNPGGPDRLGRIEEEGGEQDREKSVRLVNGFLALFWDDLRSLCLFSYHRLRDFILIAARVVELLGRSSLRGLQRGWETLKYLGSLVQYWGLELKKSAVSLLNTIAIVVAEGTDRILELIQRLRRAFLNIPSSIRQGFEAALQ

SEQ ID NO: 488 - protein, 843 aa, Artificial
  HIV Env
MRVRGILRNWQQWWIWGILGFWMVMICSVWGNLWVTVYYGVPVWKEAKTTLFCASDAKAYEKEVHNVWATHACVPTDPNPQELVLENVTENFNMWKNDMVDQMHEDIISLWDESIKPCVKLTPLCVTLNCSIVNGTDMTNCTFNATTEIKDKKRKVQALFYKLDIVPLNSTGENNNTEYRLINCNTSAITQACPKITFDPIPIHYCAPAGYAILKCNNKTFNGTGPCQNVSPVQCTHGIKPVVSTQLLLNGSLAEEEIIIRSENLTNNVKTIIVHLNKSVEIVCVRPNNNTRKSVRIGPGQTFFATNIIGDIREAHCNISENQWNETLQRVGKKLKEHFNKTIKFEQSSGGDLEITMHSFNCRGEFFYCNTSKLFNGTYMPNYNTSNSSNNSNITLPCRIKQIINMWQGVGRAIYASPIEGSITCKSNITGLLLVHDGGNSNTSTEIFRPGGGDMRDNWRSELYKYKVVEVKPLGIAPTEAKRRVVEREKRAVGIGAVFLGFLGAAGSTMGAASITLTVQARQLLFGIVQQQSNLLRAIEAQQHMLQLTVWGIKQLQARVLAIERYLKDQQLLGIWGCSGKLICTTAVPWNSSWSNKSQTDIWGNMTWVQWDKEINNYTDTIYRLLEEWQNQQEQNEKDLLALDSWKNLWSWFDISNWLWYIKIFIMIVGGLIGLRIIFAVLSIVNRVRQGYSPLSFQTLTPNPRGPDRLGGIEEEGGKQDRDRSIRLVSGFLALAWDDLRSLCLFSYHRLRDFILVTARAVELLGRSSLRGLQRGWEVLKYLGNLAQYWGLELKKSAISLINTIAIAVGERTDRIIELIQTLCRAIHNIPRRIRQGFEAALL

SEQ ID NO: 489 - protein, 846 aa, Artificial
  HIV Env
MRVRGILRNWQQWWIWGILSFWVLMICSRGEDRWVTVYYGVPVWREAKATLFCASDAKAHEREVHNVWATHACVPTDPNPQEMVMENVTENFNMWKNDMVDQMHEDIISLWDESLKPCVKLTQLCVTLECSNVNVTSSVNITKNNMDEIKNCSFNVTTEVRDKKKQVYALFYRLDVVPLNGKNSSSYRLINCNTSAVTQSCPKISFDPIPIHYCAPAGYAILKCNNKTFNGTGPCNNVSTVQCTHGIKPVVSTQLLLNGGLAEKEIIIRSENLTNNVKTIIVHLNESVEIKCTRPNNNTRRSVRIGPGQAFYTNDIIGDIRLAHCNISKKAWNKTLQLVVKKLKEHFPNRTIKFTPPPGGNLEITTHSFNCRGEFFYCNTSGLFNGTYNGTNDNDTDSDITLPCKIKQIINMWQEVGRAIYAPPIAGNITCTSNITGLLLTRDGEPSTETFRPGGGDMRDNWRSELYKYKVVEVKPLGIAPTGAKRRVVEREKRAVGIGAVFLGFLGAAGSTMGAASITLTIQARQLLSGIVQQQSNLLRAIEAQQHLLQLTVWGIKQLQTRVLAVERYLKDQQLLGIWGCSGKLICTTNVPWNSSWSNKTNSEIWDNMTWMQWDREVINYTGIIYGLLEESQNQQEQNEKDLLALDSWKNLWTWFDISNWLWYIKIFIMIVGGLIGLRIIFTVFSIVNRVRQGYSPLSLQTLTPSPRGPDGLRGIEEEGGEQDKDRSIRLVNGFLALAWDDLRSLCLFSYHRLRDLTLVTARGIELMGRSSLRGLQKGWEALKYLGNLVQYWGLELKRSAISLLDTIAIAVAEGTDRIIEFLQRIFRAIRNIPTRIRQGFEAALL

SEQ ID NO: 490 - protein, 856 aa, Artificial
  HIV Env
MRVRGILRNWQQWWIWVILGFWIYSVAGNLWVTVYYGVPVWKEAKTTLFCASDAKGYETEVHNVWATHACVPTDPDPQEMVLGNVTENFNMWENDMVDQMHEDVISLWDESLKPCVKLTPLCVTLNCTNYNGTKNNDTKIYNDTMYGEIKNCSFNMTTELRDKKEKMHALFYRLDIVPLEDNSGNSSSNYRLINCNTSAITQACPKVSFDPIPIHYCAPAGYAIIKCNNKTFNGIGPCQNISIVQCTHGIKPVVSTQLLLNGSLAEGEIIIRSKNLSDNAKIIIVHLNESVGIVCTRPNNNTRKSIRIGPGQTFYAAGDIIGNIRQAHCNISEGNWTKTLQRVSRKLRQIFNKSNIEFKPHSGGDPEITTHSFNCRGEFFYCNTSLLFNSSYNGNSSYNDTGSNSTITLQCRIKQVINMWQRVGQAIYAPPIEGIITCNSSITGLLLVRDGDNQTSDTETFRPQGGEMRDNWRSELYKYKVVEIKPLGVAPTTAKRRVVEREKRAVGMGAMILGFLSAAGSTMGAASITLTVQARQLLSGIVQQQSNLLRAIEAQQHMLQLTVWGIKQLQARVLAIERYLKDQQLLGIWGCSGKLICTTNVPWNSSWSNKSLEDIWDNMTWMQWDREISNYTREIYKLLEESQNQQEINEKDLLALDSWNSLWNWFDITKWLWYIKIFIMVVGGLIGLRIIFAVLSIVNRVRQGYSPLSLQTLTPNPRELDRLGRIEEEGGEQDRDRSIRLVDGFLALAWEDLRSLCLFSYHRLRDLILVTARAVELLGRSSLRGLQRGWEALKYLGNLVQYWGLELKKSAISLLDAIAIAVGEGTDRILELLQRIGRGICNIPRRIRQGFEAALQ

SEQ ID NO: 491 - protein, 854 aa, Artificial
  HIV Env
MRVRGIQRNWQQWWIWGSLGFWMLMIYNVMGSLWVTVYYGVPVWREAKTTLFCASDAKAYEREVHNVWATHACVPTDPNPQEMLLKNVTENFNMWKNDMVDQMHEDIISLWDQSLKPCVKLTPLCVTLMCSNVTRNQTKNQNNYTYEGIGEIKNCSFNMTTELRDKKKNVYALFYKLDIVPLNDNNEYRLINCNTSAISQACPKVSFDPIPIHYCAPAGYAILKCNNKTFNGTGPCQNVSTVQCTHGIKPVVSTQLLLNGSIAEGEIIIRSENLTNNAKTIIVHLNESVKITCTRPNNNTRESIRIGPGQTFYATGDIIGDIRKAYCNISIHEWNKTLEGVKKKLGEHFPNKTIKFQPSSGGDLEIATHTFNCRGEFFYCNTSILFNDTYWFNGTANDTGSNNITIPCRIKQIINMWQEVGRAIYAPPIRGIITCTSNITGLLLTRDGGNTGGNTTEIFRPEGGDMRNNWRNELYKYKVVEIKPLGIAPTGAKRRVVEREKRAVGIGAVFLGFLGAAGSTMGAASITLTAQARQLLSGIVQQQSNLLRAIEAQQHMLQLTVWGIKQLQTRVLAIERYLKDQQLLGLWGCSGKLICTTNVPWNLSWSNKSQKDIWESMTWMQWDNEISNYTGIIYELLEDSQNRQEKNEKDLLALDSWKNLWNWFDITNWLWYIKIFIIIIGGLIGLRIIFAVLSIVNRVRQGYSPLSLQTLTPNPRELDRLGRIEEEGGEQDKDRSIRLVNGFLALAWDDLRSLCLFSYHRLRDFILIVARVVELLGRSSLRGLQKGWETLKYLGSLIQYWGLELKKSAINLLDTTAIAVAEGTDRFIELIQRICRAVRNIPRRLRQGFEAALL

SEQ ID NO: 492 - protein, 843 aa, Artificial
  HIV Env
MRVREILRNWKQLWTWGILGFWVLIICSAGGNLWVTVYYGVPVWKEAKTTLFCASDAKVYEKEVHNVWATHACVPTDPNPQEMVLDNVTENFNMWENDMVDQMHEDIISLWDQSPKPCVKLTPLCVTLKCTDATVNDTVNHSMKEETKNCSFNATTEIRDKKRKVNALFYKLDVVPLHEGNSYRLIHCNTSTITQACPKVSFEPIPIHYCAPAGYAILKCNDKTFSGTGPCLNVSTIQCTHGIKPVVSTQLLLNGSLAEKDIIIRSENLTNNIKTIIVHLNDSVQIVCTRPNNNIRKSVRIGPGQAFYATGDIIGDIREAYCNINGSDWNRTLQWVKNKLGEHFPNTVIKFEPSSGGDLEITTHSFNCRGEFFYCNTSGLFNNNLINNGAEDTIRLPCRIKQIINMWQEVGRAMYAPPIAGNITCTSNITGLLLTRDGGNGGNNTETFRPGGGNMKDNWRSELYKYKVVEIKPLGVAPTEAKRRVVEREKRAVEIGAVFLGFLGAAGSTMGAASITLTVQARQLLSGIVQQQSNLLRAIEAQQHLLQLTVWGIKQLQTRVLAVERYLKDQQLLGIWGCSGKLICTTNVPWNSSWSNKSQSDIWENMTWMQWDRKISNYTTTIYRLLEESQTQQEQNEKDLLALDSWNSLWSWFDITRWLWYIKIFIMIVGGLIGLRIIFAVLSIVNRVRQGYSPLSFQTLTPNPREPDRPGRIEKEGGEQDKSRSIRLVSGFLALAWDDPRSLCLFSYHRLRDFILVVVRAVELLGRSSLKGLKRGWEALEYLKNLGLYWGLELKKSAISLLNTIAIAVAEGTDRVIEFVLRICRAIRHIPRRIRQGFEAALL

SEQ ID NO: 493 - protein, 843 aa, Artificial
  HIV Env
MRVRGILRIWQWWWIWASLGFWMLIICNEKGKLWVTVYYGVPVWKEAKTTLFCASDAKAYEREVHNVWATHACVPTDPNPQEIVLGGVTENFNMWKNDMVDQMHEDVISLWDESLKPCVKLTPLCVTLKCGNVNNDTENMKEEMRNCTFNTTTEIRDKEKQMYALFYRLDIVPLHDSSSDGSEYVLINCNTSTITQACPKVSFDPIPIHYCAPAGYAILNCNNKTFNGTGPCQNVSTVQCTHGIKPVVSTQLLLNGSLAEGEIIIRSENLTNNAKTIIVHLNESIEIVCVRPNNNTRKSIRIGPGQTFYATGEIIGNIRQAYCSISGGNWTETLRRVKNKLGEHFPNKTITFGPSSGGDLEITTHSFNCRGEFFYCNTSKLFNSTNNNTESESNATITLPCRIKQFIRMWQRVGQAMYAPPIAGNITCRSNITGLLLTRDGKNDTETFRPGGGNMRDNWRNELYKYKVVEIKPLGIAPTEAKRRAVEREKRAVGIGAVILGFLGAAGSTMGAASITLTAQARQLLSGIVQQQSNLLRAIEAQQHLLQLTVWGIKQLQARVLAMERYLQDQQLLGIWGCSGKLICTTAVPWNSSWSNKTQEDIWNKTTWMQWDKEISNYTDIIYSLLADSQNQQEKNEQELLALDSWKSLWNWFDITNWLWYIKIFIMVVGGLIGLRIIFAVLSLVNRVRQGYSPLSFQTLTPNTRELDRLGRIEEEGGEQGRDRSIRLLNGFLAIAWDDLRSLCLFSYHRLRDFILLIARAVELLGRSSLKGLQRGWEALKYLGSLVQYWGLELKKSATSLLDTIAIAVAEGTDRIIETVLRICRAILHIPRRIRQGFEAALL

SEQ ID NO: 494 - protein, 853 aa, Artificial
  HIV Env
MRVRGILRNYQQWWIWGILGFWMLMMCNVMGDLWVTVYYGVPVWREAKTTLFCASDAKGYEKEVHNVWATHACVPTDPDPQEMVLENVTENFNMWKNDMVDQMHEDIISLWDQSLKPCVKLTPLCVTLKCVSINATSNGTVTINGEIKNCSFNVTTELRDKRKNEHALFYRLDIVPLNGKNQSNEYRLINCNTSAITQACPKVSFDPIPIHYCAPAGYAILKCNNKTFNGTGPCNNVSTVQCTHGIKPVVSTQLLSNGSLSEKEIIIRSENLTNNVKTIIVHLNESVEIECTRPNNNTRRSIRIGPGQTFYATGEIIGDIRQAYCTINESTWNRTLQEVSRKLVERFPNKTIRFQPPSGGDLEITTHSFNCRGEFFYCNISRLFNRPNMTKNMTSDIKNNSTITLPCRIKQIINMWQGVGRAMYAPPIAGRIICKSNITGLLLVRDGGQDNVMNATETFRPGGGDMRDNWRSELYKYKVVEIKPLGVAPTSAKRRVVEREKRAAIGAMFLGFLGAAGSTMGAASITLTVQARKLLSGIVQQQSNLLRAIEAQQHMLQLTVWGIKQLQTRVLAIERYLKDQQLLGIWGCSGKLICTTNVPWNASWSNKSQEDIWNNMTWMQWDKEVSNYTNTIYKLLEESQNQQERNEKDLLAMDSWKNLWNWFDITNWLWYIKIFIMIVGGLIGLRIVFAVLSIVNRVRQGYSPLSFQTLIPNPRGLDRLGRIEEEGGEQDRDRSIRLVNGFLALAWEDLRSLCLFSYHRLRDFILVTARAVELLGRSSLRGLQRGWEALKYLGSLVQYWGLELKKSAISLLDTIAIVVAEGTDRIIELVLGICRAIRNVPTRIRQGFEAALQ

SEQ ID NO: 495 - protein, 846 aa, Artificial
  HIV Env
MRVKGIMRNCQQWWIWGILGFWMLLICNGEGNLWVTVYYGVPVWKEAKTTLFCASDAKGYEREVHNIWATHACVPTDPNPQEMFLHNVTENFNMWKNDMVDQMHEDIISLWDESLKPCVKLTPLCVTLECKNVTTNVTINNVTANNNTSDMKNCSFNATTEVTDKIRKENALFYTLDIVPLDENQNYRLINCNTSKVTQACPKVSFDPIPLHYCAPAGYAILKCNNNTFNGTGPCNNVSTIQCTHGIKPVVSTQLLLNGSRAEKEIIIRSENMTNNAKTIIVHLNESIEIECIRPNNNTRKSIRIGPGQTFYATNGMIGDIRQAHCNISGADWNRTLQGVGRKLAGYFPNKTISFQPSSGGDLEITTHSFNCGGEFFYCNTSSLFNNTYRPTYWPGTESNSTITLQCRIKQIINMWQKVGRAIYAPPIAGKITCKSNITGLLLVRDGGGGNNTATEIFRPGGGNMKDNWRSELYKYKVVEIKPLGIAPTGAKRRVVGREKRAVGIGAVFLGFLGAAGSTMGAASITLTVQARQLLSGIVQQQSNLLKAIEAQHHLLQLTVWGIKQLQARVLAIERYLKDQQLLGIWGCSGKLICTTAVPWNSSWSNKSQADIWDNMTWMQWDREISNYTDTIYRLLEVSQTQQEQNEQDLLALNKWQHLWNWFDITKWLWYIKIFIMIVGGLIGLRIIFAVLSIVNRVRQGYSPLSLQTLTPNQREPDRLGRIEEEGGEQDRKRSIRLVSGFLALAWDDLRSLCLFSYHHLRDFILIAARVVELLGRRGWDILKYLASLVQYWGLELKKGAISLLDSIAIAVAEGTDRIIAFIQRLFRAICNLPRRIRQGFEASLL

SEQ ID NO: 496 - protein, 838 aa, Artificial
  HIV Env
MRVMGTQRNCQQWWIWGILGFWMLMIYNVGGNLWVTVYYGVPVWKEAKTTLFCASDAKAYEKEVHNVWATHACVPTDPSPQEIVLENVTETFNMWKNDMVDQMHEDIISLWDQSLKPCVKLTPLCVTLNCSAANNTVAEMKGEIKNCSFHISTEMRDKRQKEFALFNILDIVPLNNENNTKNSDYRLISCNTSTITQACPKVSWDPIPIHYCAPAGYAILKCNNKTFNGTGPCNNVSTVQCTHGIKPVVSTQLLLNGSLAEEIVIRSENISDNAKTIIVHLNESVEIECRRPNNNTGKSVRIGPGQTFFATGGIIGEIRRAHCDINGTKWTETLQKISEKLRGYFKKTIIFAPSSGGDPEITTHSFNCRGEFFYCNTSQLFNSTYRANTSNSNITLPCRIKQIINMWQGVGRAMYAPPIAGNIICKSNITGVLLTYDGGEENETFRPAGGNMKDNWRSELYKYKVVEIKPLGIAPTKAKRRVVEREKRAALGAVFLGFLGAAGSTMGAASITLTVQARQLLSGIVQQQSNLLRAIEAQQHMLQLTVWGIKQLQARVLAIERYLRDQQLLGIWGCSGKIICTTAVPWNSSWSNKNEEDIWGNMTMQWDREISNYTDTIYRLLEDSQSQQEQNEKDLLALDSWKNLWSWFDISNWLWYIKIFIMIVGGLIGLRIIFAVLSIVNRVRQGYSPLSFQTLTPSQRELDRLGRIEEEGGEQDRDRSIRLANGFLALAWEDLRSLCLFSYRHLRDFILIVVRAVELLGRSSLRGIQKGWDALKYLGSLVQYWGLELKKSAISLLDTIAIAVAEGTDRIIEVVQRLYRAILNIPRRIRQGFEAALQ

SEQ ID NO: 497 - protein, 849 aa, Artificial
  HIV Env
MRVRGILRNYPQWWIWGILGFWMIMLCNVMGNLWVTVYYGVPVWKEAKTTLFCASDAKAYEKGVHNVWATHACVPTDPNPQEVFLENVTENFNMWKNDMVDQMHEDIISLWDQSLKPCVKLTPLCVTLKCSTYNGTYTDNYQEKIKNCSFNTTTEIRDKKQSGYALFYKFDVVPLNGNNTSEYILINCNTSAISQACPKVSFDPIPIHYCTPAGFAILKCNNRTFNGTGPCNNVSTVQCTHGIKPVVSTQLLLNGSLAEEDIIIRSENLTDNVKTIIVHLNESIEINCTRPNNNTRKSIRIGPGQTFYAAGEIIGKIRLAYCNISEEVWKKTLQRVGRKLKEHFPNKTIQFQPPSGGDLEVTTHSFNCRGEFFYCDTSELFNSTYMSNGGNISSSTIIMLPCRIEQIINMWQGVGRAMYAPPIKGSITCRSNITGLLLTRDGGLNRSTEEPEIFRPGGGDMRNNWRSELYKYKVVEIKPLGVAPTGAKRRVVEREKRAVGIGAVFLGFLGAAGSTMGAASITLTVQARQLLSGIVQQQSNLLRAIEAQQHMLQLTVWGIKQLQTRVLAIERYLKDQQLLGIWGCSGKLICTTNVPWNSSWSNRSEADIWDSMTWMQWDKEISNYTGTIYRLLEESQTQQEKNEKDLLALDSWQNLWNWFSITNWLWYIKIFIMIVGGLIGLRIVFAVLSIVNRVRQGYSPLSFQTLTQNPGGPDGLGRIEEEGGEQDKDRSIRLVNGFLPLVWDDLRNLCLFSYHRLRDFILVIARAVELLGRSSLRGLQRGWETLKYLGNLLLYWGLEPKKSAINLLDTTAIAVAEGTDRILELVQGICRAIRNIPRRIRQGFEAALQ

SEQ ID NO: 498 - protein, 846 aa, Artificial
  HIV Env
MRVMGIQRNCQQWWIWGILGFWMIFNGMGSWVTVYYGVPVWKEAKATLFCASDARAYDREVHNVWATHACVPTDPNPQEVILENVTENFNMWKNDMVEQMHEDIISLWDQSLKPCVKLTPLCVTLNCTKVNGTNGTSNNSSVPMEEEMKNCSFNITTELRDKKQQGRALFYSLDIVQPNNSTEYRLINCNTSTITQACPKVSFDPIPIHYCAPAGYAILKCNNKTFNGLGPRNNVSTVQCTHGIKPVVSTQLLLNGSLAEEEIIIRSENLTDNAKIIIVHLNESVRIECTGPNNNTRKSMRIGPGQTFYATGEIVGDIRQAHCNISEKDWNKTLHRVRKKLAEHFSKNITFKPSSGGDLEITTHSFNCGGEFFYCNTSRLFNESYNFDESYWNNTNKTIMLPCRIKQIINMWQGVGRAIYAPPIAGNITCVSNITGLLLTWDGGHQSNETFRPGGGDMRDNWRSELYKYKVVEIKPLGIAPTEARRRVVEREKRAVGIGAVFLGFLGAAGSTMGAASITLTVQARQLLSGIVQQQSNLLRAIEAQQHMLQLTVWGIKQLQTRVLAIERYLKDQQLLGIWGCSGKLICTTNVPWNNSWSNKSLNYIWENMTWMEWDREISNYSDTIYRLLEDSQNQQEKNEKDLLALDSWNNLWNWFSITNWLWYIKIFIMIVGGLIGLRIIFAVLSIVNRVRQGYSPLSFQTLIPNPRRSDRLGRIEEEGGEQDRGRSIRLVSGFLALAWDDLRSLCLFSYHRLRDFILIAARAAELLGRSGLRGLQKGWETLKFLGSLVQYWGLELKKSAISLLDTTAIAVAEGTDRIIEIAQRICRAICNVPTRIRQGFEAALQ

SEQ ID NO: 499 - protein, 845 aa, Artificial
  HIV Env
MRVMGILKNYQQWWMWGILGFWMLIISSVVGNLWVTVYYGVPVWKEAKTTLFCTSDAKAYETEVHNVWATHACVPTDPNPQEIVLENVTENFNMWKNDMVDQMHEDIISLWDQSLKPCVKLTPLCVTLKCRNVNATNNIMIDNSNKGEMKNCSFNVTTELRDRKQEVHALFYRLDVVPLQGNNNEYRLINCNTSAITQACPKVSFDPIPIHYCTPAGYAILKCNNQTFNGTGPCNNVSSVQCAHGIKPVVSTQLLLNGSVAKGEIIIRSENLTNNAKIIIVQLNKPVKIVCVRPNNNTRKSVRIGPGQTFYATGEIIGDIRQAYCIINKTEWNSTLQGVSKKLEEHFSKKAIKCEPSSGGDLEITTHSFNCRGEFFYCDTSQLFNSTYSPSNGTENKLNGTITITCRIKQIINMWQKVGRAMYAPPIAGNLTCESDITGLLLTRDGGKTGPNDTEIFRPGGGDMRDNWRNELYKYKVVEIKPLGVAPTEAKRRVVEREKRAVGIGAVCLGFLGAAGSTMGAASITLTVQARLLLSGIVQQQNNLLRAIEAQQHLLQLTVWGIKQLQTRILAVERYLKDQQLLGIWGCSGKLICTTAVPWNSSWSNRSHDEIWDNMTWMQWDREINNYTDTIYRLLEESQNQQEKNEKDLLALDSWQNLWNWFSITNWLWYIKIFIMIVGGLIGLRIIFAVLSIVNRVRQGYSPLPFQTLTPNPREPDRLGRIEEEGGEQDRGRSIRLVSGFLALAWDDLRSLCLFSYHRLRDFILIAARVLELLGQRGWEALKYLGSLVQYWGLELKKSAISLLDTIAIAVAEGTDRIIEFIQRICRAIRNIPRRIRQGFEAALQ

SEQ ID NO: 500 - protein, 844 aa, Artificial
  HIV Env
MRVKGIPRNWQQWWIWGSLGFWIICSVMGNLWVTVYYGVPVWKEAKTTLFCASDAKAYEKEVHNVWATHACVPTDPSPQEIVLGNVTENFNMWKNDMVDQMHEDIISLWDQSLKPCVKLTSLCVTLHCSNVNGSNNANSSYSNDMKEEIKNCSFNMTTELRDKKQKVYALFYRLDVVPLGDNSSYRLINCNTSTISQACPKISFDPILIHYCAPGGYAILKCNNKTFSGTGPCQNVSTVQCTHGIKPVVSTQLLLNGSLAEEKIIIRSGNVTNNAKTIIVHLNESVEIVCTRPNNNTRKSIRIGPGQTFYATDIIGDIRQAYCNVSKTNWNKTLKGVKGELRKHFHKNITFQPASGGDLEITTHTFNCRGEFFYCNTSRLFDETYLSGTDEDNGTITLPCKIKQIINMWQEVGRAIYAPPIAGNITCKSNITGLLLTRDGGLNNDSETFRPIGGEMRNNWRSELYKYKVVEIKPLGIAPTKAKRRVVEREKRAVGIGAVFLGFLGAAGSTMGAASITLTVQAKQLLSGIVQQQSNLLKAIEAQQHMLQLTVWGIKQLQTKVLAIERYLKDQQLLGFWGCSGKLVCTTAVPWNSSWSNKSLGDIWDNMTWMQWDREISNYTGTIYRLLEDSQNQQEKNEKDLLALDSWKNLWNWFGITNWLWYIKIFIMIVGGLIGLRIIFAVLSIVNRVRQGYSPLSFQTLPPNPRGIDRLGRIEEGGGEQDRDRSIRLVNGFLALAWDDLRSLCLFSYHQLRDFILVVARAVELLGRSSLRGLQRGWEALKYLGSLIQYWGLELKRSTISLLDTVPIAVPEGTDRIIELIQRIWRAICNIPRRIRQGFEAALL

SEQ ID NO: 501 - protein, 843 aa, Artificial
  HIV Env
MRVMEIMRNCQQWWIWGILGFWMLMICNVMGKSWVTVYYGVPVWREAKATLFCASDAKAYEKEVHNVWATHACVPTDPNPQEVVLENVTENFNMWENDMVNQMHEDIISLWDQSLKPCVKLTPLCVTLNCTNDTLHQNLTDMKNCSFNVTTELRDKRKHEYALFYRLDIVPLNNKNESSEYRLINCNTSTITQSCPKVSFDPIPIHYCAPAGYAILKCNNKTFNGTGPCNNVSTVQCTHGIKPVVSTQLLLNGSLAEKEIIIRFKNITNNAKTIIVHLNESVEIVCIRPNNNTRKSVRIGPGQTFYATEAIIGNIREAHCNISESQWNKTLHRVIEKLKEHFPNKTIGFSQAAGGDLEITTHSFNCGGEFFYCNTSKLFNSTYIQLNSTETPNSTITLPCRIKQFINLWQEVGRAMYAPPIAGNIICKSNITGLLLTRDGDKNDSETFRPAGGDMRDNWRSELYKYKVVEIKPLGLAPTKAKRRVVEREKRAVGIGAVFLGFLGAAGSTMGAASITLTVQARQLLSGIVQQQSNLLRAIEAQQHMLQLTVWGIKQLQTRVLAIERYLKDQQLLGIWGCSGKLICTTAVPWNASWSNKSQEEIWGNMTWMQWDREISNYTDTIYRLLEVSQNQQEKDEKDLLALDSWQNLWNWFDIPKWLWYIKIFIMIVGGLIGLRIIFAVISMVKRVRQGYSPLSFQTLTPNPRGPDRLERIEEEGGEQDRNRSIRLVSGFLALAWDDLRSLCLFCYHRLRDFTLVTARAVELLGRSSLKGLQRGWEILKYLGSLVQYWGLELKKSAISLLDTTAIAVAEGTDRIIEVLQRIGRAIRNTPRRIRQGFETALL

SEQ ID NO: 502 - protein, 844 aa, Artificial
  HIV Env
MRVRGILRNYLQWWIWGILGFWMLMVCSKENMWVTVYGVPVWKEAKTTLFCASDAKAYEGEVHNVWATHACVPTDPNPQELVLGNVTENFNMWKNDMVDQMHEDIISLWDESLKPCVKLTPLCVTLNCSNNVTRNYNNKNNGEIKNCSFNATTEIRDKQQKVYALFYRLDIVPLDNNSSEYRLINCNTSTITQACPKVSFDPIPIHYCAPAGYAILKCNNKTFNGTGPCTNVSTVQCTHGIKPVVSTQLLLNGSLAEEEIIIRSENITDNVKTIIVHLNKSVEIVCTRPNNNTRKSIRIGPGQTFYATGDIIGDIRQAHCNISKGAWNETLQWVGKKLKEHFPNKTIRFKESSGGDLEITTHSFNCGGEFFYCNTSQLFNSTYNYMPSNNTGTNITLQCRIKQIINRWQEVGRAMFAPPIAGNITCKSNITGILLVRDGGNTSENIETFRPGGGNMKDNWRSELYKYKVVEVKPLGIAPTRAKRRVVEREKRAVGIGAVFLGFLGAAGSTMGAASITLTVQARQLLSGIVQQQSNLLRAIEAQQHMLQLTVWGIKQLQARVLALERYLRDQQLLGIWGCSGKLICTTNVPWNSSWSNKTENEIWENMTWMQWEREIDNYTDTIYRLLEVSQNQQEQNEKDLLALDSWANLWNWFNISNWLWYIKIFIMIVGGLIGLRIIFAVLSIVNRVRQGYSPLSFQTLIPSPREPDKLERIEEEGGEQDRDRSIRLVSGFLALAWDDLRSLCLFSYHRLRDSILVAARTVELLGRSSLRGLQRGWEALKYLGSLVQYWGLELKKSAISLLDTIAIAVAEGTDRIIELTQRVFRAIRNIPRRIRQGFEAALQ

SEQ ID NO: 503 - protein, 852 aa, Artificial
  HIV Env
MRVRGILRSWQQWWIWGTLGFWICSGLGNLWVTVYDGVPVWREASNTLFCASYAKAYEKEVHNVWATHACVPTDPNPQEIELDNVTENFNMWKNDMVDQMHEDIISLWDQSLKPCVKLTPLCVTLKCTNYSTNYSNTMNSYNNNTTEEIKNCTFNMTTELRDKKQQVYALFYKLDIVPLNSNSSEYRLINCNTSAITQACPKVSFDPIPIHYCAPAGYAILKCKNNTFNGTGPCQNVSTVQCTHGIKPVVSTQLLLNGSLAEGEIIIRSKNLSNNAYTIIVHLNDSVEIVCTRPNNNTRKGIRIGPGQTFYATENIIGDIRQAHCNISAGEWNKAVQRVSAKLREHFPNKTIEFQPSSGGDLEITTHSFNCRGEFFYCNSSKLLNSSYNGTSYRGTESNSSIITLPCRIKQIINMWQKVGRAIYAPPIEGNITCSSSITGLLLARDGGLDNVTTEIFRPQGGDMKDNWRNELYKYKVVEIKPLGVAPTEAKRRVVEREKRAVGIGAVIFGFLGAAGSTMGAASITLTAQARQLLSGIVQQQSNLLRAIEAQQHMLQLTVWGIKQLQARVLAIERYLKDQQLLGIWGCSGKLICTTTVPWNSSWSNKTQGEIWENMTWMQWDKEISNYTGIIYRLLGESQNQQEQNEKDLLALDSWNNLWSWFNISNWLWYIKIFIMIVGGLIGLRIIFAVLSIVNRVRQGYSPLSFQTLTPNPRGLDRLGRIEEEGGEQDRDRSIRLVQGFLALAWDDLRSLCLFSYHRLRDLILVTARVVELLGRSSLRGLQRGWEALKYLGSLVQYWGLELKKSATSLLDSIAIAVAEGTDRIIEVIQRIYRAFCNIPRRVRQGFEAALQ

SEQ ID NO: 504 - protein, 849 aa, Artificial
  HIV Env
MIVRGILKTCQQWWIWIILGFWILIINNVVGHLWVTVYDGVPVWKEAKTTLFCASDAKAYDKEVHNVWATHACVPTDPNPQEIILKNVTENFNMWKNDMVDQMHEDIISLWDQSLKPCVKLTPLCVTLDCTNVTSNATMGNTLENGGGEMKNCSFNMTTEIRDKKKQVYALFYRLDVVPLNGENSNSSGEYRLINCNTSALTQACPKVTFDPIPIHYCAPAGYAILKCNNKTFNGTGPCNNVSTVQCTHGIKPVVSTQLLLNGSLAEEEIIIRSENLTNNAKTLIVHLNESVEIVCIRPNNNTRKSIRIGPGQTFFATGDIIGDIRQAHCIINGSEWKRTLQRVSEKLGKHFPNKTIKFAPHSGGDLEITTHVLNCRGEFFYCNTSKLFNSTYNSTDRSNNTDNITIQCRIKQIINMWQGVGRAMYAPPIEGNITCKSNITGLLLVRDGGTEENNTGTEIFRPEGGDMRDNWRSELYKYKVVEIKPLGIAPTKAKRRVVEREKRAVGIGAVFLGFLGAAGSTMGAASITLTVQARQLLSGIVQQQSNLLQAIEAQQHLLQLTVWGIKQLQTRVLAIERYLKDQQLLGIWGCSGKLICTTAVPWNVSWSNRSEDDIWNNMTWMQWDREINNYTNTIYRLLEESQNQQEKNEKDLLALDSWNSLWNWFSIVNWLRYIKIFIMIVGGLIGLRIIFAVLSIVNRVRQGYSPLSFQTLTPNPRGPDRLGRIEEEGGEQDRDRSVRLVHGFLALAWDDLRSLCLFSYHRLRDFILVAVRVVELLGRRGWEALKYLGSLVQYWGLELKKSAINLLDTIAIAVAEGTDRIIDFILRICRAIRNIPRRLRQGFEAALQ

SEQ ID NO: 505 - protein, 851 aa, Artificial
  HIV Env
  misc_feature (417)..(417): Xaa can be any naturally occurring amino acid
MRVMGILRNCQQWWIWGILGFWMLMICSVLGNLWVTVYYGVPVWREAKTTLFCASDAKAFESEVHNVWATHACVPTDPNPQEMVLENVTENFNMWKNDMVDQMHEDIISLRDQSLKPCVKLTPLCVTLNCTNATNTNNVTSSMIGGMKNCSFNITTELRDKRKKESALFYRLDIVPLNENNSSSNSEYRLINCNTSTITQACPKVSFDPIPIHYCAPAGYAILECNNKTFNGTGPCTNVSTVQCTHGIKPVVSTRLLLNGSLAEEEIIIRSENLTNNAKIIMVQLNESIEIVCTRPNNNTRKSTRIGRGQTFYAMGRIIGDIRQAHCNISGWNNTLQQVVKKLRKHFPNKTITFAPPSGGDLEITTHSFNCGGEFFYCNTSILFNSTYNSTYTGSDSNSTITIPCRIKQIINMWQGXGQAMYVPPIAGNITCRSNITGLLLTRDGGKVTGNTTETFRPGGGNMRDNWRSELYKYKVVEVKPLGVAPTAAKRRVVEREKRAVGLGAVFLGFLGAAGSTMGAASITLTVQARQLLSGIVQQQSNLLRAIEAQQHMLQLTVWGIKQLQARVLALERYLKGQQLLGIWGCSGKLICTTSVPWNSTWSNKSLDDIWQNMTWMEWDREINNYTNTIYRLLEESQNQQEKNEQELLALDSWANLWNWFAISNWLWYIKIFIMIVGGLIGLRIVFAVLSVVNRVRQGYSPLSLQTLTPNPRGPDGLERIEEGGGEQDRGRSIRLVSGFLALAWDDLRSLCIFLYHHLRDFILIAARTVNLLGQSSLRGLQRGWEALKYLGSLGQYWGQELKKSAINLLDTIAIAVAEGTDRIIEVLQGAIRAILNIPTRIRQGLEAALQ

SEQ ID NO: 506 - protein, 850 aa, Artificial
  HIV Env
MRVMGIKKNWQPWWIWGVLGFWTLMICSVMGNLWVTVYYGVPVWREAKTTLFCASDAKAYEAEVHNVWATHACVPTDPNPQEIELKNVTENFNMWENDMVDQMHEDIISLWDQSLKPCVKLTPLCVTLNCKNVTSKDINTSNAEMKAEMKNCSFNITTELRDKKKQEYALFYKLDIVPLTNDASENSEYRLINCDTSTITQSCPKVTFDPIPIHYCAPAGYAILKCNNKTFNGTGPCNNVSTVQCTHGIKPVVSTQLLLNGSLAEKEIIIRSKNITDNVKTIIVHLNESVEIECTRPGNNTRRSVRIGPGQAFYATGDIIGDIRAAHCNISESKWNKILYRVSEKLKEHFPNKTIQFGQPIGGDLEITTHSFNCRGEFIYCNTSKLFNGTYNSTGTSNSTITLSCRIKQIINMWQGVGRAMYASPIAGNITCKSNITGLLLTRDGGNETSGIEIFRPAGGDMRDNWRSELYKYKVVEIKPLGLAPTKSKRRVVGREKRAVTFGAMFLGFLGAAGSTMGAASMTLTVQARQLLSGIVQQQSNLLRAIEAQQHMLQLTIWGIKQLQTRVLAVERYLRDQQLLGIWGCSGKLICTTAVPWNSSWSNKSQHDIWDNLTWMQWDREISNYTDTIYRLLEESQNQQERNEKDLLALDSWKTLWSWFDISNWLWYIKIFIMIVGGLIGLRIIFAVLSIVNRVRQGYSPLSFQTLTPNPRGPDRLEGIEEEGGEQDKDRSIRLVSGFLALAWDDLRSLCLFCYHRLRDFILVTARAVELLGRSSLKGLQRGWEILKYLGSLVQYWGLELKKSAISLLDTTAIAVAEGTDRIIEVLQRVGRAIRNTPRRIRQGFEAALL

SEQ ID NO: 507 - protein, 850 aa, Artificial
  HIV Env
MRVRGTQRNWQRWWIWSILAFWILINCNGEEKLWVTVYYGVPVWKEAKTTLFCASDAKAYEREVHNVWATHACVPTDPNPQEMVLENVTENFNMWKNDMADQMHEDIISLWDQSLKPCVKLTPLCVTLNCTEAKVNMKKDTMKEEIKNCSFKVNTELKDKKHKEYALFYKLDIVPLDGNNEDGNKQYRWINCNTSSITQACPKVSFDPIPIHYCAPAGFAILKCNNKTFNGTGPCQNVSTVQCTHGIKPVVSTQLLLNGSLAEEEIIIRSENLTDNAKTIIVHFNESVQINCTRPGNNTRKSVRIGPGQAFYATGDIIGDIRKAYCNISKGEWAKVMQKVTGKLKEHFPKNITFQPPSGGDLEITTHSFNCRGEFFYCNTSELFNGTYNGTDNNSNKTITLLCRIKQIINTWQEVGRAIYAPPIAGNIICISNITGLLLTRDGGKTNDTNDTEIFRPGGGNMKDNWRSELYKYKVVEIKPLGVAPTKAKRRVVEREKRAVGIGAVLLGFLGTAGSTMGAASITLTVQARQVLSGIVQQQSNLLRAIEAQQHMLQLTVWGIKQLRARVLAIERYLKDQQLLGVWGCSGRLICTTAVPWNTSWSNKSLTDIWDNMTWMQWEREIDNYTGIIYSLLEESQIQQEKNEQDLLALDSWANLWNWFNISNWLWYIKIFIMIVGGLIGLRIVFAVLSIVNRVRQGYSPLPFQTLTPNPRELDRLGRIEEEGGEQDRDRSIRLVSGFLALAWDDLRSLCLFSYHRLRDFLLVTVRAAELLGRSSLRGLQRGWEALKYLGSLVRYWGLELKKSAISLLDTIAVAVAEGTDRIIEVIQGICRGIRNIPRRIRQGFEAALL

SEQ ID NO: 508 - protein, 847 aa, Artificial
  HIV Env
MRVMGIQKNCQRWWIWGILGFWMIMSYSVLGNLWVTVYYGVPVWREAKTTLFCASDAKAYEREVHNIWATHACVPTDPNPQEMVLENVTENFNMWKNDMVDQMHEDIIRLWDQSLKPCVKMTPLCVTLNCANFNASSTSTGTNSMNGQIKNCSFNITTELRDKRKQESALFYRLDIVPLKENSSEYRLINCNTSAITQACPKVSFDPIPIHYCAPAGYAILKCNNKTFNGTGPCNNVSTVQCTHGIKPVVSTQLLLNGSLAEEEIIIRSENLTNNVKTIIVHLNESVEIVCTRPNNNTRKSMRIGPGQIFYATGDIIGDIREAHCNISKQKWNKTLQQVGKKLAEYFPNRTIAFNSSARGDLEIATHSFNCRGEFFYCNTSGLFNSTYNPNSTYTESKANSNITLHCRIKQIINMWQEVGRAMYAPPIAGNITCRSNITGLLLTRDGGNTTETKETFRPGGGDMRDNWRSELYKYKVVEIKPLGVAPTEAKRRVVERGKRAAGLGAVLFGFLGAAGSTMGAASITLTVQARQLLSGIVQQQSNLLRAIEAQQHMLQLTVWGIKQLQARVLAIERYLKDQQLLGIWGCSGKLICTTNVPWNSSWSNKSQTDIWDKMTWMEWDREINNYTDTIYWLLEKSQNQQEENEKDLLALDSWKNLWNWFDITNWLWYIKIFIMIVGGLIGLRIIFAVLSIVNRVRQGYSPLSFQTLNPNPRGLDRLGRIEEEGGEQDKSTSIRLVNGFLAIAWDDLRSLCLFSYHRLRDFILIAARAVELLGRSSLRGLQRGWEALKYLGSLVQYWGLELKKRAISLLDTTAIAVAEGTDRIIEIVLRICRAICNVRGFEAALQ

SEQ ID NO: 509 - protein, 854 aa, Artificial
  HIV Env
MRVMGIKMNWQQWWIWGILGFWMLMICSVMGNLWVTVYYGVPVWKEAKAPLFCASDAKVYEKEVHNVWATHACVPTDPNPQELVLENVTENFNMWKNDMVDQMHEDIISLWDQSLKPCVKLTPLCVTLKCSNVTVNTTYNNAIDGETIDKEMKNCSFNITTELRDKKKQEQALFYRLDIVPLDNANGTSEYRLINCNTSTITQSCPKVSFDPIPIHYCAPAGYAILKCNNKTFNGIGPCNNVSTVQCTHGIKPVVSTQLLLNGSLAEKEIVIRSENLTDNVKTIIVHLNQSVQIECTRPGNNTRKSMRIGPGQAFYATGEIIGNIRQAYCNINESLWNETLYKVSEKLKEYFNTTIEFQQPAGGDLEITTHSFNCRGEFFYCNTTKLFNGTYSQPNSTGTPHSNITLPCKIKQIINMWQGVGRAMYAPPIAGNITCISNITGLILTRDGGVNRSDTEIFRPAGGDMRDNWRSELYKYKVVEIKPLGLAPTKAKRRVVEREKRAVGIGAVFLGFLGAAGSTMGAASITLTVQVRQLLSGIVQQQSNLLRAIEAQQHMLQLTVWGIKQLQTRVLAIERYLKDQQLLGIWGCSGKLICTTAVPWNASWSNKSQGEIWENMTWMQWDREINNYTDTIYRLLEESQNQQEKNEKDLLALDSWKNLWNWFDITNWLWYIKIFIMIVGGLIGLRIIFAVLSMVNRVRQGYSPLSFQTLTPNPRGPDRLERIEEEGGEQDRDRSIRLVNGFLALAWDDLRNLCLFCYHRLRDFILVTARAVELLGRSSLTGLQRGWEILKYLGSLVQYWGLELKKSAISLLDTTAIAVAEGTDRIIELLQRIGRAIRNTPRRIRQGFETALL

SEQ ID NO: 510 - protein, 840 aa, Artificial
  HIV Env
MRVKGILRNWLQWWIWGSLGFWMLCSVMGNMWVTVYYGVPVWREATTTLFCASDAKAYEKEVHNVWATHACVPTDPNPQEIVLGNVTENFNMWRNDMVEQMHEDIISLWDQSLKPCVKLTPLCVTLDCTNVTVDANSTYVIHVGNITTEMKNCSFNMTTELRDKNKNVYALFYRLDIVPLGEDSSYRLINCNTSAISQACPKISFDPIPIHYCAPAGYAILKCNNKTFNGTGPCQNVSTVQCTHGIKPVVSTQLLLNGSLAEEEVVIRSENLTNNAKTIIVQLKEPVKIVCTRPNNNTRKSIRIGPGQTFYATGDIIGDIRQAHCNISEEEWNNSLQKVAKKLREHFPNKTIAFNSSSGGDLEITTHTFNCRGEFFYCNTSQLFNSTYNGRNSTTNATITLPCRIKQIINMWQEVGRAIYAPPIKGNITCESNITGLLLTRDGGSNDTTETFRPEGGDMRNNWRSELYKYKVVEIRPLGIAPTGAKRRVVNREKRAVGVAAVFLGFLSAAGSTMGAASITLTVQARQSLSGIVQQQSNLLRAIEAQQHLLQLTVWGIKQLQTRVLAIERYLKDQQLLSLWGCSGRLICTTNVPWNSSWSNKSYEDIWDNMTWMQWDKEISNYTDTIYRLLEVSQNQQEQNEKDLLALDKWKDLRNWFNISNWLWYIRIFIMIVGGLIGLRIIFAVLSIVNRVRQGYSLTSLQTHLPNAGGLDRLDRIGEEGGEQDRHRSIRLVSGLLALAWDDLRSVRLFSYHQLRNFILIVARAVELLGRRGWETLKYLGNLIQYWGLELKKSAINLLDTLAIAVAEGTDRIIELIQRVCRAILNIPRRVRQGFEAALQ

SEQ ID NO: 511 - protein, 852 aa, Artificial
  HIV Env
MRVMGTLRNCQQWWTWGILGFWMLMICSVGGNLWVTVYYGVPVWKEAKTTLFCASDAKAYDKEVHNVWATHACVPTDPSPQEMFLANVTENFNMWENDMVDQMHQDIISLWDESLKPCVKLTPLCVTLNCRNANLNSTRKSNPSMQGDIKNCSFNITTEIRDKRRKVYALFYKLDIVELDGNSSNYVLINCNTSTVKQACPKVTFDPIPIHYCAPAGYAILKCNNKTFNGTGPCNNVSTVQCTHGIKPVVSTQLLLNGSLAEKEIIIRSENITNNIKTIIVHLNEPVEIVCTRPGNNTRTSIRIGPGQTFYATGDIIGDIRQAHCNISEGNWTKTLHRVGEKLKEHFPNKTIKFAPPSGGDLEIIMHSFNCGGEFFYCNTSKLFNSTYNATYNSTDTSNSTITIPCRIKQIINMWQGVGQAMYAPPIAGNITCKSNITGILLTRDGGINNTNGTETFRPGGGDMRDNWRSELYKYKVVEVKPLGIAPTKAQRRVVEREKRAVGIGAVFLGFLGAAGSTMGAASITLTVQARQLLSGIVQQQSNLLRAIEAQQHMLQLTVWGIKQLQARVLAIERYLKDQQLLGIWGCSGKLICTTAVPWNSSWSNKSYGDIWDNMTWMQWDREISNYTDTIYKLLEDSQIQQEKNEKDLLALDSWNNLWTWFGISSWLWYIKIFIMIVGGLIGLRIIFAVLSIVNRVRQGYSPLSFQTLTPVPREPDRLGGIEEEGGEQDRDRSVRLVNGFLALFWDDLRSLCLFSYHRLRDLILIAVRAVELLGRSSLWGLQKGWEALKYLGNLVQYWGLKLKKSAISLFDTIAIAVAEGTDRIIELIQIICRAIRNIPTRIRQGLEAALL

SEQ ID NO: 512 - protein, 843 aa, Artificial
  HIV Env
MRVMGIQKNCQHWWIWGILGFWMLMICNGKDLWVTVYYGVPVWREAKATLFCASNAKAYEKEVHNVWATHACVPTDPNPQEMVLENVTENFNMWKNDMVDQMHEDIISLWDQSLKPCVKLTPLCVTLTCTNATKNVTNNNDTTYNIEEMRNCSFNITTEIRDKRRQESALFYKLDIVPLDNSSSKYILINCNTSVITQACPKVTFEPIPIHYCAPAGYAILKCNNKTFNGTGPCNNVSTVQCTHGIKPVVSTQLLLNGSLAEEEIIIRSKNITNNANTIIVQLKDPVDILCVRPSNNTRKSVRIGPGQTFYATGDIIGDIRQAHCNISADDWKSTLQNVSEKLRRHFPNKTIVFNSPSGGDLEIITHSFNCEGEFFYCNTSGLFNSAFNDNSGGTITLQCRIEQIINMWQKVGRAIYAPPIAGNITCSSRITGLLLTRDGGKNDTHETFRPAGGDMRDNWRSELYKYKVVEIKPLGVAPSEAKRRVVEREKRAALGAVFLGFLGAAGSTMGAASITLTVQTRKLLSGIVQQQSNLLKAIEAQQHMLQLTVWGIKQLQARVLALERYLRDQQLLGIWGCSGKLICTTNVPWNSSWSNRTQDDIWGNMTWMQWDREINNYTDIIYGLLEESQYQQERNEKDLLALDSWNNLWNWFNISNWLWYIKIFIMIVGGLIGLRIIFAVLSIVNRVRQGYSPLSFQTLTPNPRGPDRLGRIEEEGGEQDRDRSIRLVSGFLALAWDDLRSLCLFSYHRLRDFILIAARAVELLGHSILRGLQRGWEILKYLGSLVQYWGLELKKSAISLLDTIAIAVAEGTDRIIELVQRICRGVLNIPRRIRQGFEAALQ

SEQ ID NO: 513 - protein, 849 aa, Artificial
  HIV Env
MRVRGILRNCPQWWIWGILGFWMLMTCNMEGNLWVTVYYGVPVWKEAKATLFCASDAKAYDKEVHNVWATHACVPTDPDPQEIVLENVTESFNMWKNDMVDQMHEDVISIWDQSLKPCVKLTPLCVTLNCSNVNNTIDGAMKEGMKNCSFNTTTEVRDKKNKQYVLFYKLDIVPLNGNGSNSEYRLINCNTSTLTQACPKVSFDPIPIHYCAPAGYAILKCNNKTFNGTGPCNNVSTIQCTHGIKPVVSTQLLLNGSIAEEEIIIRSENLTDNVKTIIVHLKDPIDIVCTRPGNNTRKSVRIGPGQTFFATGDIIGDIRQAHCNISKERWNKTLQEVGEKLERHFPNKTIEFKPSSGGDLEITTHSFNCRGEFFYCNTSGLFNSTYYSNKTSSNMTTNEIITIPCKIKQIINMWQEVGRAMYAPPIAGNITCKSNITGLLLVRDGGNNNTTETFRPGGGNMKDNWRSELYKYRVVEIKPLGIAPTGAKRRVVEREKRAVTLGAMFLGFLGAAGSTMGAASITLTVQARQLLSGIVQQQSNLLRAIEAQQHMLQLTVWGIKQLQTRVLAIERYLKDQQLLGIWGCSGKLICTTAVPWNSSWSNKSYDSIWDNMTWMQWDREINNYTDTIYKLLEESQNQQEQNEKDLLALDSWQSLWNWFSITKRLWYIKIFIMIVGGLIGLRIIFAVLSIINRVRQGYSPLSFQTLTPTPRDPDRLRGIEEEGGEQDRDRSIRLVSGFLALAWDDLRSLCLFSYHRLRDFILVTARVVELMGRSSLKGLQRVWEILKYLGSLVQYWGLELKKSAISLLDTIAIATAEGTDRIIELIQRICRAIYNIPTRIRQGFEAALL

SEQ ID NO: 514 - protein, 844 aa, Artificial
  HIV Env
MRVRGILRNYQQWWIWGILGFWMLMICNVVGNLWVTVYYGVPVWKEAKTTLFCASDAKAYDKEVHNVWATHACVPTDPNPQEMVLENVTENFNMRDNDMVDQMHEDIINLWDQSLKPCVRLTPLCVTLNCKDASVNYTNATGWPTEDEKLQNCSFNVTTVIRDKKHKEYALFYRPDIVPLNEGNYRLINCNTSTVTQACPKVSFDPIPIHYCTPAGYAILKCNNKTFNGKGPCNNVSTVQCTHGIKPVVSTQLLLNGSIAEEEIIIRSENLTNHFRTIIVQLNQSIEINCTRPSNNTRKSIRIGPGQAFYATNDIIGDIRQAHCNISEKKWYKALHGVREKLKVLFPNKNISFQPAAGGDLEVTTHSFNCKGEFFYCNTSKLFNTSWLDSYISNTGNNSIITLPCRIKQIINMWQKVGRAMYANPIEGNITCRSNITGLLLENDGNMTFRPGGGDMKDNWRSELYKYKVVEIKPLGIAPTEAKRRVVEREKRAVGIGAVFLGFLGAAGSTMGAASITLMVQARQLLSGIVQQQSNLLRAIEAQQHLLQLTVWGIKQLQARVLAMERYLKDQQLLGIWGCSGKLICTTAVPWNSSWSNKTQNDIWENMTWMQWDREISNYTDTIYRLLEESQTQQEQNEKDLLALDSWQNLWSWFSITNWLWYIKIFIMIVGGLIGLRIIFAVLSLVNRVRQGYSLTSFQTVIPNPRGPDRPRGIEEEGGEQDRDRSIRLVSGFLALAWDDLRSLCLFSYHQLRDFILLIARVVERLGYSSLRGLQRGWEALKYLGNLVQYWGLELKKSAISLLDTIAIAVAEGTDRIIEFIQRICRAIRNLPRRIRQGFEAALL

SEQ ID NO: 515 - protein, 839 aa, Artificial
  HIV Env
MRVRGIPRNWQQWWIWSILGFCSVVGQLWVTVYYGVPVWKEAKATLFCASDAKAYEKEVHNVWATHACVPTDPNPQKLVLGNVTENFNMWKNDMVDQMHEDMIRLWDQSLKPCVKLTPLCVTLKCREVNATKNGNITMKGEIKNCSFNATTEIKHKKKEMYALFYRLDIVPLKNSSEYRLINCYTSAIAQTCPKISFDPIPIHYCAPAGYAILKCYNKTFNGTGPCKNVSTVQCTHGIKPVVSTQLLLNGSLAEEEIVIRSENLTNNVKTIIVHLNESIEIVCIRPNNNTRKSIRIGPGQTFYATGAIIGNIREAYCNISGDAWNKTLQQVGRKLKEYFPGSTIRFAPHSGGDLEITTHSFNCRGEFFYCNTSRLFNSTYNPNTKSNTGSWIILPCRIKQIINMWQKVGRAMYAPPIAGNITCKSNITGLLLVRDGGTATDEIFRPGGGDMRDNWRSELYKYKVVEIKPLGIAPTEAKRRVVEREKRAVGLGAVFLGFLGAAGSTMGAASITLTVQARQLLSGIVQQQNNLLRAIEAQQHLLQLTVWGIKQLQTRVLAIERYLKDQQLLGIWGCSGKLICTTAVPWNSSWSNKSQEEIWNNMTWMQWDREVSNYTDTIYRLLEVSQNQQEKNEKDLLALDSWQNLWNWFDITNWLWYIKIFIMIVGGLIGLRIIFAVLSIVNRVRQGYSLLSFQTLTPNPRGPDRLGGIEEEGGEQDRDRSIRLVNGFFSLAWDDLRSLCLFSYHRLRDLILVTVRVVELMGRCSLRGLQRGWEALKYLGSLVQYWGLELKKSAISLLDATAVAVAEGTDRILEIIQRIFRAICNIPRRIRQGFETALL

SEQ ID NO: 516 - protein, 848 aa, Artificial
  HIV Env
MRVKGILRNWQQWWIWGILGFWMLMICNVVGNLWVTVYYGVPVWKEAKTTLFCASDAKAYDKEVHNVWATHACVPTDPNPQEIVLENVTENFNMWKNDMVDQMHEDIISLWDQSLKPCVKLTPLCVTLKCTNVNATNVNRTMTEEIKNCSFNITMELRDRKQKVNALFYKLDIVPLNEKANNSYSYYRLINCNTSAITQACPKVSFDPIPIHYCAPAGYAILKCNNKTFNGTGPCQNVSTVQCTHGIKPVVSTQLLLNGSLAEGEIIVRSENLTDNVKTIIVHLDKPVGIVCIRPNNNTRKSIRIGPGQTFYATGDIIGNIKEAYCNIKESEWNRTLQRVGEKLGKYFPSKTIKFNSSSGGDLEITTHSFNCRGEFFYCNTSKLFTYQSNTYVANSTITLPCKIKQIINMWQEVGRAMYAPPIAGNITCQSNITGLLLTRDGGTETDNKTETFRPGGGDMRDSWRSELYKYKVVEIKPLGVAPTKAKRRVVEREKRAVGIGAVLLGFLGAAGSTMGAASIALTAQARQVLSGIVQQQSNLLRAIEAQQHMLQLTVWGIKQLQARVLAIERYLKDQQLLGLWGCSGKLICTTAVPWNSSWSNKSKEDIWNNMTWMQWDREISNYTNTIYRLLEDSQSQQEKNEKDLLALDSWKNLWTWFDISNWLWYIRIFIMIVGGLIGLRIIFAVLSIVNRVRQGYSPLSFQTLTPNPRELDRLGRIEEEGGEQDRDRSVRLVNGFLALAWDDLRSLCLFSCHRLRDCILIAVRAVELLGRSSLKGLQRGWEALKYLGSLVQYWCLELKKSATSLIDAIAIAVAEGTDRIIDLIQRICRAIRNIPRRIRQGFEAALQ

SEQ ID NO: 517 - protein, 854 aa, Artificial
  HIV Env
MRVRGILRDYQQWWIWSILGFWMICNGMGNLWVTVYYGVPVWREAKTTLFCASDAKAYEKEVHNVWATHACVPTDPNPQELVLKNVTENFNMWKNDMVDQMHEDVISLWDQSLKPCVKLTPLCVTLICSNNITITNTTIYKYTTSDIRNCPFNVTTELKDKRRKEYALFYRIDIVPLDENNNSSEYRLINCNTSAVTQACPKVSFDPIPIHYCAPAGYAILKCNNETFNGTGPCNNVSTVQCTHGIKPVVSTQLLLNGSLAEKEIIVRSENLTNNAKIIIVQLKQSVGIECIRPNNNTRKSIRIGPGQTFYATGEIIGDIRKAHCTINKKAWNTTLQEVGRKLAEHFPNKTIKFQPHSGGDPEITMHSFTCGGEFFYCNTSELFNSTYNANTYNTATGNNSTTIILPCRIKQIINMWQEVGRAMYAPPIEGNITCKSNITGLLLVRDGGGKNATNDTEIFRPEGGDMRNNWRSELYKYKVVEIKPLGVAPTKAKRRVVDKEKRAIAGAVFLGFLGVAGSTMGAASVALTVQARQLLSGIVQQQSNLLRAIEAQQHMLQLTVWGIKQLQTRVLAIERYLKDQQLLGIWGCSGKIICTTAVPWNNSWSNKTEQQIWNSTTWMEWDREISNYTDIIYRLLENSQYQQEQNEKELLALDRWDTLWSWFNITNWLWYIRLFIMIVGGLIGLRIIFAVLSIVNRVRQGYSPLSLQTLTPSPRRPDRLGGIEEEGGEQDRTRSVRLVNGFLALAWDDLRSLCLFSYHHLRDFILVTARAVELLGRSSLRGLQRVWEALKYLGSLVQYWGLELKKSAISLFDTIAIAVAEGTDRIIELVLRICGAIRNIPTRIRQGFEAALQ

SEQ ID NO: 518 - protein, 851 aa, Artificial
  HIV Env
MRVMGIKRNCQQWWIWGILGFWMLMICNGNLWVTVYYGVPVWREAKTTLFCASDAKAYDKEVHNVWATHACVPTDPNPQEIVLENVTENFNMWKNDMVDQMHEDIISLWDQSLKPCVKLTPLCVTLNCNKVTVNTTVTVTNNTMDTVMKNCSFNVTTELRDKRKQEHALFYRLDIVPLETKNSNESAYRLINCNTSAITQACPKVTFDPIPIHYCAPAGYAILKCNNETFNGTRPCNNVSTVQCTHGIKPVVSTQLLLNGSRAEKEVVIRAESLTDNAKVIIVHLKDSVQINCTRPNNNTRKSMRIGPGQTFYATGEIIGDIRQAHCNISRSQWNKTLYEVSEKLREKFPNKTIQFNSSTGGDLEITTHSFNCGGEFFYCNTSKLFNSTFNSNGHDSTGNDPLTIPCRIKQIINMWQEVGRAMYAPPIAGRIICNSTITGLILTRDGGNTNNTEIFRPIGGNMRDNWRSELYKYKVVEIKPLGIAPTKAKRRVVEREKRAVGIGAVFLGFLGAAGSTMGAASITLTVQARQLLSGIVQQQSNLLRAIEAQQHMLQLTVWGIKQLQTRVLAIERYLKDQQLLGIWGCSGKLICTTAVPWNTSWSNKSEEEIWENMTWMQWDREINNYTDLIYRMLEESQNQQEKSEKDLLALDSWKNLWNWFDITNWLWYIKIFIMIVGGLIGLRIIFAVLSVVNRVRQGYSPLSFQTLTPNQRGPDRLGEIEEEGGEQDRDRSIRLVNGFLAIVWDDLRSLCLFSYHRLRDFILIATRAVELLGRSSLKGLQRGWEILKYLGSIVQYWGLKLKKSAISLLDTTAIAVAEGTDRIIELLRRFCRAIYSIPRRIRQGFEAALQ

SEQ ID NO: 519 - protein, 853 aa, Artificial
  HIV Env
MRVMEIWRNCPPWWIWGILGFWMLMICNGGNRWVTVYYGVPVWREAKATLFCASDAKAYEREVHNVWATHACVPTDPDPQEIALENVTENFNMWKNDMVDQMHEDIISLWDQSLKPCVKLTPLCVTLNCVNVTKNVTKNLNNNMKEEIKNCSFNITTELRDKKQNVYALFYKVVIVPLSENSTSEYRLINCNTSAITQACPKVSFDPIPIHYCAPAGYAILKCNNKTFNGTGPCNDVSTVQCTHGIKPVVSTQLLLNGSLAEEDIIIRSKNLTDNAKTIIVHLNESVNITCTRPNNNTRKSIRIGPGQTFYATGDIIGDIRQAHCSINKEAWNKTLLRVSKKLREHFPNKTIIFDKSSGGDLEITTHSFNCGGEFFYCNTSNLFNNTYYPNMTNTDTKSNLTITLPCRIKQIINRWQEVGRAMYAPPIAGNITCTSNITGLLLVRDGGRTSDSTKEIFRPGGGDMRDNWRSELYKYKVVEIKPLGIAPTEAKRRVVEREKRAVTIGAMFLGFLSAAGSTMGAASITLTVQARQLLSGIVQQQSNLLRAIEAQQHMLQLTVWGIKQLQTRVLAIERYLKDQQLLGIWGYSGKLICTTTVPWNDSWSNKSKEEIWGNMTWMQWDKEINNYTSLIYTLLEDSQIQQERNEKDLLALDSWKNLWNWFNISNWLWYIKIFIMIVGGLIGLRIIFAVLSIVNRVRQGYSPLSFQTLAPNPGGLDRLGRIEEEGGEQDRGRSIRLVNGFLAIAWEDLRSLCLFSYHRLRDLTLIVTRAVELLGRSSLKGLQRGWEALKYLGSLGQYWGLELKKSAIGLLDTIAIAVAEGTDRIIELIQRTFRAICNIPRRIRQGFETALL

SEQ ID NO: 520 - protein, 850 aa, Artificial
  HIV Env
TRVMGTQRNCQKWWEWGILVFGMIMMCKAADLWVTVYYGVPVWRDADTTLFCASDAKAYATEKHNVWATHACVPTDPNPQEVNLANVTEDFNMWKNNMVEQMHADIISLWDQSLKPCVKLTPLCVTLNCSNANTTNTNSTEEIKNCSYNMPTELKDKTQKVYSLFYELDVVLLNRSKNSSYSTYRLISCNTSVITQACPKVSFEPIPIHYCAPAGYAILKCKDKEFNGKGSCSNVSSVQCAHGIRPVASTQLLLNGSLAEGKVMIRSENITDNAKNIIVQFNKPVPINCTRPNNNTRKSIRFGPGQAFYTNNNIIGDIRQAHCNISITEWNATLKKVVEQLREHFPNKTIIFNSSSGGDLEITTHSFNCGGEFFYCNTTGLFNSTWENGTNKQNYTESNDTITLQCRIKQIINMWQRVGRAMYAPPIAGVIKCTSNITGMILTRDGGKNSINETFRPGGGDMRDNWRSELYKYKVVKIEPLGIAPTEARRRVVQREKRAVGLGAVFLGFLGAAGSTMGAASITLTVQARQLLTGIVQQQSNLLKAIEAQQQMLRLTVWGIKQLQARVLALERYLQDQQLLGIWGCSGKLICATDVRWNSSWSNKTQEQIWKNMTWLQWDKEISTYTDIIYMLLEESQNQQEKNEQDLLALDKWANLWNWFDITRWLWYIKIFIMIVGGLIGLRIVIAIISVVKRVRQGYSPLSFQIPTPNPEGLDRPGRIEEEGGEQGRDRSIRLVSGFLALAWDDLRSLCLFSYHRLRDCILIAARIVELVGHSSLKGLRLGWEGLKHLWNLLVYWGQELKTSAIRLLDTIAVAVAEWTDRVIEIGQRACRAIRNIPRRIRQGLERALL

SEQ ID NO: 521 - protein, 865 aa, Artificial
  HIV Env
MRVMGTQRNYQHLWRGGILILGMLIMCKATDLWVTVYYGVPVWKDADTILFCASDAKAYDTEVHNVWATHACVPTDPNPQEINLENVTENFNMWKNNMVEQMQEDIISLWDQSLKPCVKLTPLCVILNCSNANTSTHSNSSSTQSPINEEIKNCSYNTTTILRDKTQKVYSLFYRLDVVQLDESENKNTSGSNTLYRLINCNTSTITQACPKVTFEPIPIHYCAPAGFAILKCKDPRFNGTGSCKNVSSVQCTHGIKPVASTQLLLNGSLAEGGKIMIRSENITNNAKNIIVQFTKPVLITCIRPNNNTRKSIRFGPGQAFYTNEIIGDIRQAHCNINKTLWNDTLQKVAEQLREKFPKKTIIFTNSSGGDPEITTLSFNCAGEFFYCNTTGLFNGTWWNNGTWNGPYTPNNTNGSIILPCRIKQIINMWQRVGRAMYAPPIAGIIKCTSNITGIILTRDGGNNGTNETFRPGGGDMRDNWRSELYKYKVVKLEPLGVAPTRAKRRVVEREKRAVGLGAVFLGFLGAAGSTMGAASLTLTVQARQLLSGIVQQQSNLLQAIEAQQHLLKLTVWGIKQLQARVLAVERYLKDQQLLGIWGCSGKLICATTVPWNTSWSNKSQDEIWDNMTWLQWDKEISNYTNIIYRLLEESQNQQEKNEQDLLALDKWADLWSWFNISHWLWYIRIFIMIVGGLIGLRIVFAIITVVNRVRQGYSPVSFQIPTPSPEGPDRPRGTEEGGGEQGRDRSIRLVNGFFALAWDDLRSLCLFSYHRLRDCILIAARTVELLGHCSLKGLRLGWEGLKNLWNLLLYWGRELKNSAISLFDTIAVAVAEWTDRVIEIGQRAFRAILNIPRRIRQGLERALL

SEQ ID NO: 522 - protein, 862 aa, Artificial
  HIV Env
MRVRGIQRNYQHLWKWGILILGMLMISKATEDLWVTVYYGVPVWRDAETTLFCASDAKAYDTEAHNVWATHACVPTDPNPQEINLENVTENFNMWKNGMVEQMHEDIISLWDQSLKPCVKLTPLCVTLNCSRVKNTISSTQSPDSNNTMNCSFETTTELRDKKQKVQALFYELDIVQLNSSDSNDTLNRQYRLIHCDTSTITQACPKVSFEPIPIHYCAPAGFAILKCKDPEFNGTGPCKNVSSVQCTHGIRPVASTQLLLNGSLAEGNKTIIRSANITDNTKNIIVQFTKPVQINCTRPDVGQRRSVRIGPGRAFYTRQTYTRQAKGDIRQAQCNISSRQWNDTLQKVAEQLRKYFSNKTIIFTNSSGGDIEITTHSVNCGGEFFYCDTSGLFNSTWPANASRENEEKDRNVTLPCRIKQIVNMWQRVGRAMYAPPINGTIKCTSNITGMILTRDGNSGGNATNETFRPGGGDMRDNWRSELYKYKVVKLEPLGVAPTRARRRVVEREKRAAVGLFFLGFLGAAGSTMGAASVTLTVQARQLLSGIVQQQSNLLKAIEAQQHMLRLTVWGIKQLQARVLAVERYLQDQQLLGIWGCSGKLICTTFVPWNSSWSNRTQDDIWNNMTWLQWEREIDNYTGTIYRLLEESQNQQEKNEKDLLALDKWASLWNWFDISNWLWYIKIFIMIVGGLIGLRIVMAIISVVNRVRQGYSPVSFQIPPPTPEDPDRHGRIEDGGGEQGRDRSVRLVSGFLALVWEDLRSLCLFSYHRLRDCISIAARTVELLGHSSLKGLRLGWEGLKYLWNLLLYWGRELKNSAISLFNATAIAVAEWTDRVIEIVQRACRAIINIPRRIRQGLERALL

SEQ ID NO: 523 - protein, 857 aa, Artificial
  HIV Env
MRVKGMQRNWQNLWKWGALILGLVIICSASNNLWVTVYYGVPVWEDANTPLFCASDAKSYSTERHNVWATHACVPTDPNPQEMILENVTESFNMWKNDMVEQMHVDIISLWDQSLKPCVKLTPFCVTLNCTNATFPNATGNNSIFTEEMKNCSYNITTELRDKTKTVRSLFYTLDIVQINKDNNTYRLIKCNTSTITQACPKVSFEPIPIHYCAPAGFAILKCKDPKFNGTGPCENVSSVQCTHGIRPVVSTQLLLNGSLAEEEVMIRSENITDNAKNIIVQFDKPVEITCIRPNNNTRKSIRFGPGQAFYTNSIIGDIRQAYCNISKAGWNDILQKVAEQLGKHFSGKNITFANSSGGDLEITTHSFNCGGEFFYCNTTNLFNSTFNTTSLFNSTGRNGTNDNTTITIPCRIKQIINMWQRVGRAMYAPPIAGIINCTSNITGIILTRDGEKGGDNTIEVFRPVGGDMRDNWRSELYKYKVVKIKPLGIAPTRARRRVVEKEKRAVGLGAVFLGFLGAAGSTMGAASITLTVQARQLLSGIVQQQNNLLKAIEAQQHLLKLTVWGIKQLQARVLALERYLQDQQLLGLWGCSGKLICTTIVPWNSSWSNKTQNEIWDNMTWLQWDKEINNYTDTIYKLLEDSQNQQEKNKQDLLALDKWASLWNWFDITKWLWYIKIFIMIVGGLIGLRIVFAVLSIVNRVRQGYSPLSFQTLTHHQREPDRPERIEEGGGEQDRDRSVRLVSGFLALAWDDLRSLCLFCYHRLRDSILIAARTVELLRHSSLKGLRLGWEGLKYLWNLLLYWGQELKNSASNLLDTVAIAVANWTDRVIEAAQGACRAIRNVPRRIRQGLERALL

SEQ ID NO: 524 - protein, 854 aa, Artificial
  HIV Env
  misc_feature (7)..(7): Xaa can be any naturally occurring amino acid
  misc_feature (16)..(16): Xaa can be any naturally occurring amino acid
  misc_feature (35)..(35): Xaa can be any naturally occurring amino acid
  misc_feature (39)..(39): Xaa can be any naturally occurring amino acid
  misc_feature (43)..(44): Xaa can be any naturally occurring amino acid
  misc_feature (59)..(59): Xaa can be any naturally occurring amino acid
  misc_feature (94)..(94): Xaa can be any naturally occurring amino acid
  misc_feature (98)..(98): Xaa can be any naturally occurring amino acid
  misc_feature (151)..(152): Xaa can be any naturally occurring amino acid
  misc_feature (189)..(189): Xaa can be any naturally occurring amino acid
  misc_feature (207)..(207): Xaa can be any naturally occurring amino acid
  misc_feature (229)..(229): Xaa can be any naturally occurring amino acid
  misc_feature (237)..(237): Xaa can be any naturally occurring amino acid
  misc_feature (250)..(250): Xaa can be any naturally occurring amino acid
  misc_feature (269)..(269): Xaa can be any naturally occurring amino acid
  misc_feature (323)..(323): Xaa can be any naturally occurring amino acid
  misc_feature (337)..(337): Xaa can be any naturally occurring amino acid
  misc_feature (365)..(365): Xaa can be any naturally occurring amino acid
  misc_feature (393)..(393): Xaa can be any naturally occurring amino acid
  misc_feature (430)..(430): Xaa can be any naturally occurring amino acid
  misc_feature (434)..(434): Xaa can be any naturally occurring amino acid
  misc_feature (452)..(452): Xaa can be any naturally occurring amino acid
  misc_feature (454)..(454): Xaa can be any naturally occurring amino acid
  misc_feature (457)..(457): Xaa can be any naturally occurring amino acid
  misc_feature (466)..(466): Xaa can be any naturally occurring amino acid
  misc_feature (469)..(469): Xaa can be any naturally occurring amino acid
  misc_feature (480)..(480): Xaa can be any naturally occurring amino acid
  misc_feature (489)..(489): Xaa can be any naturally occurring amino acid
  misc_feature (499)..(500): Xaa can be any naturally occurring amino acid
  misc_feature (510)..(510): Xaa can be any naturally occurring amino acid
  misc_feature (515)..(515): Xaa can be any naturally occurring amino acid
  misc_feature (521)..(521): Xaa can be any naturally occurring amino acid
  misc_feature (524)..(524): Xaa can be any naturally occurring amino acid
  misc_feature (551)..(551): Xaa can be any naturally occurring amino acid
  misc_feature (554)..(554): Xaa can be any naturally occurring amino acid
  misc_feature (558)..(558): Xaa can be any naturally occurring amino acid
  misc_feature (565)..(565): Xaa can be any naturally occurring amino acid
  misc_feature (574)..(574): Xaa can be any naturally occurring amino acid
  misc_feature (579)..(579): Xaa can be any naturally occurring amino acid
  misc_feature (586)..(586): Xaa can be any naturally occurring amino acid
  misc_feature (590)..(590): Xaa can be any naturally occurring amino acid
  misc_feature (594)..(594): Xaa can be any naturally occurring amino acid
  misc_feature (604)..(605): Xaa can be any naturally occurring amino acid
  misc_feature (608)..(608): Xaa can be any naturally occurring amino acid
  misc_feature (612)..(612): Xaa can be any naturally occurring amino acid
  misc_feature (617)..(617): Xaa can be any naturally occurring amino acid
  misc_feature (625)..(625): Xaa can be any naturally occurring amino acid
  misc_feature (630)..(630): Xaa can be any naturally occurring amino acid
  misc_feature (639)..(639): Xaa can be any naturally occurring amino acid
  misc_feature (649)..(649): Xaa can be any naturally occurring amino acid
  misc_feature (661)..(661): Xaa can be any naturally occurring amino acid
  misc_feature (663)..(664): Xaa can be any naturally occurring amino acid
  misc_feature (671)..(671): Xaa can be any naturally occurring amino acid
  misc_feature (674)..(674): Xaa can be any naturally occurring amino acid
  misc_feature (685)..(685): Xaa can be any naturally occurring amino acid
  misc_feature (701)..(702): Xaa can be any naturally occurring amino acid
  misc_feature (722)..(722): Xaa can be any naturally occurring amino acid
  misc_feature (729)..(729): Xaa can be any naturally occurring amino acid
  misc_feature (748)..(748): Xaa can be any naturally occurring amino acid
  misc_feature (752)..(752): Xaa can be any naturally occurring amino acid
  misc_feature (773)..(773): Xaa can be any naturally occurring amino acid
  misc_feature (782)..(782): Xaa can be any naturally occurring amino acid
  misc_feature (787)..(789): Xaa can be any naturally occurring amino acid
  misc_feature (794)..(795): Xaa can be any naturally occurring amino acid
  misc_feature (798)..(798): Xaa can be any naturally occurring amino acid
  misc_feature (801)..(801): Xaa can be any naturally occurring amino acid
  misc_feature (822)..(823): Xaa can be any naturally occurring amino acid
  misc_feature (826)..(826): Xaa can be any naturally occurring amino acid
  misc_feature (847)..(847): Xaa can be any naturally occurring amino acid
MKARGMXRNYQHLWRXGTMLFWMIIMCKAAEDLVXVYYXVPVXXDAATTLFCASDAKAXDKEVHNVWATHACVPTDPDPQEIILGNVTEKFDMXKNNXVEQMQTDIISLDQSLKPCVKLTPLCVTLNCAEPNSTRSNNSSVNSNSSDSLFXXMKNCSFNMTTELRDKRKTVHSLFYKLDIVSTSNNDSXQYRLINCNTSAMTQACPXVTFEPIPIYYCAPAGFAILKCXDTNFTRTXPCKNVSTVQCTHXIKPVVSTQLLLNGSLAEKXVMIRSENITDNVKIIIVQLTEPVNITCIRPGNNTRTSIRIGPGQTFYATGDVIXDIRKAYCNVSRAAXNSTLQKISTQLRKYFNNKTIIFKSSTGXDLEVTTHSFNCGGEFFYCNTTDLFNSTXDGTVTNSTKANGTITLPCRIKQIINMWQRVGQAMYAXPIKXSIRCESNITGLLLTRDGXGXTNXSNETFRPIXGDXRNNWRSELYKXKVVKIEPIXVAPTRAKRRXXEREKRAIGLXAAFLXFLGAAXSTXGAASMTLTVQARQLLSGIVQQQSNLLXAIXAQQXLLKLTVXGIKQLQARXLAVEXYLKDQQXLRIXGCSXKLICTTNVPXXSSXSNKXQSEIXDNMTMQDXEVINXTDIIYDLIXKSQNQQEKNXQDLLALDKAGLXSXXDISNWLXYIXIFIIIVGGLIXLRIIFAVLSIINRARXXYSPLSLQTLTPHPERPDRPXRIKEEGXEQGRDRSIRLVSGFLALAXDDLXSLCLFSYHRLRDFISIAARTXELLKRSSLXGLRLXXXGLKYXXNLXGYXGQELKSSAINLIDTIAIAVAXXTDXVIEIGQRFCRAIRNIPRRIRXGAEKALQ

SEQ ID NO: 525 - protein, 853 aa, Artificial
  HIV Env
MRVMGIQRNCQHLLTWGIMILGTIIFCSAVENLWVTVYYGVPVWRDADTTLFCASDAKAYETEKHNVWATHACVPTDPNPQEIHLDNVTEKFNMWKNNMVEQMHTDIISLWDQSLKPCVKLTPLCVTLHCTNVTSVNTTGDREGLKNCSFNMTTELRDKRQKVYSLFYRLDIVPINENQGSEYRLINCNTSAITQACPKVSFEPIPIHYCTPAGFAILKCKDEGFNGTGLCKNVSTVQCTHGIKPVVSTQLLLNGSLAEKNITIRSENITNNAKIIIVQLVQPVTIKCIRPNNNTRKSIRIGPGQAFYATGDIIGDIRQAHCNVTRSRWNKTLQEVAEKLRTYFGNKTIIFANSSGGDLEITTHSFNCGGEFFYCNTSGLFNSTWYVNSTWNDTDSTQESNDTITLPCRIKQIINMWQRAGQAMYAPPIPGVIKCESNITGLLLTRDGGKDNNVNETFRPGGGDMRDNWRSELYKYKVVEIEPLGVAPTRAKRRVVEREKRAVGIGAVFLGFLGAAGSTMGATSITLTVQARQLLSGIVQQQNNLLRAIEAQQHLLKLTVWGIKQLQARVLAVERYLRDQQLLGIWGCSGKLICTTNVPWNSSWSNKSLDEIWNNMTWLQWDKEINNYTQLIYRLIEESQNQQEKNEKELLELDKWANLWSWFDISNWLWYIKIFIIIVGGLIGLRIVFAVLSVINRVRQGYSPLSFQTHTPNPRGLDRPERIEEEDGEQGRGRSIRLVSGFLALAWDDLRSLCLFSYHRLRDFILIAARTVELLGHSSLKGLRLGWEGIKYLWNLLSYWGRELKISAINLVDTIAIAVAGWTDRVIEIAQRIGRAILHIPVRIRQGLERALL

SEQ ID NO: 526 - protein, 859 aa, Artificial
  HIV Env
MRVMGIQRNCQHLLRWGTIILGLIIICSVADKLWVTVYYGVPVWKDAETTLFCASDAKAYDPEVHNVWATHACVPTDPNPQEMHLENVTEESNMWKNNMVEQMHTDIISLWDQSLKPCVKLTPLCVTLNCTNVNSTRVVNITDKEEIKNCSFNMTTELVDKQQQVHSLFYRLDIVQMNENRGNSSNSSYNEYRLINCNTSAITQACPKVTFEPIPIHYCAPAGFAILKCKDDAFNGTGRCKNVSTVQCTHGIKPVVSTQLLLNGSLAKGGIRIRSENITNNVKTILVQLDKPVNITCIRPYHNTRTRIHIGPGRSFYTGDIKGSIRQAHCTVNRSEWNNTLQQVAKQLRTYFGNKTIIFTNSSGGDLEITTHSFNCKGEFFYCNTSSLFNSTWSNDNNTQGSNSTETKGTITLPCRIKQIINMWQRAGKAMYAPPIQGVIRCESNITGLILTRDGGDAGENETFRPGGGDMRDNWRSELYKYKVVKIEPLGVAPTQARRRVVKREKRAVGLGAVFIGFLGAAGSTMGAASITLTVQARQLLSGIVRQQSNLLKAIEAQQHLLKLTVWGIKQLQARILAVERYLKDQQLLGIWGCSGKLICTTNVPWNTSWSNKTQSEIWGNMTWLQWDKEISKYTGIIYDLLEESQNQQEMNEQDLLALDKWANLWNWFDITNWLWYIRIFIMIVGGLIGLRIVFAVLSIINRVRQGYSPLSFQTHTPNPGGLDRPGRIEEEGGEQGRDRSIRLVSGFLALAWDDLRSLCLFSYHHLRDLILIAARTVELLGHSSLKGLRLGWEGLKYLGNLLLYWGRELKISAINLLDTTAIAVAGWTDRVIEIVQGIGRAFLHIPRRIRQGFERALL

SEQ ID NO: 527 - protein, 856 aa, Artificial
  HIV Env
MRVMGTQMNWQHLLRWGTIILGMIMICSTADNLWVTVYYGVPVWKDAETTLFCASDAQAYKTEMHNVWATHACVPTDPNPQELHLKNVTEEFNMWKNSMVEQMHTDIISLWDESLKPCVKLTPLCVTLNCTNANGTQNVNITNVGMRNCSFNMTTELRDKKQKGYSLFYKLDIVQINDNGNNSNNSSEYRLINCNTSAITQACPKVSFEPIPIHYCAPAGFAILKCRDKEFNGTGPCNNVSTVQCTHGIKPVVSTQLLLNGSLAEEKIMIRSENISDNAKTIIVQLTEPVTINCTRPSNNTRTSIRIGPGQAFYATGDITGDIRQAHCNVSRSSWNKTLQDIVTQLRVYWNRTIIFNSSSGGDLEITTHSFNCGGEFFYCNTSGLFNSTWSQNDTGVSNSTESNDTIILPCRIKQIINMWQRAGQAIYAPPIPGIIRCESNITGLLLTRDGGVVNSTNETFRPGGGNMKDNWRSELYKYKVVKIEPLGVAPTRARRRVVQREKRAVGLGALFIGFLGAAGSTMGAASITLTVQARQLLSGIVQQQSNLLRAIEAQQHLLKLTVWGIKQLQARVLAVERYLKDQQLLGIWGCSGKLICTTNVPWNSSWSNKSQNEIWEDMTWLQWDREISNYTEIIYKLIEESQNQQEKNEQDLLALDKWANLWNWFEITKWLWYIKIFIMIVGGLIGLRIVFAVFSVINRVRQGYSPLSFQTHTPDPRGLDRPRRIEEEGGEQGRGRSIRLVSGFLALAWDDLRSLCLFSYHRLRHFILIATTTVELLGHSSLKGLRLGWEGLKYLGNLLLYWGQELKLSAISLFDTPAIAVAGWTDRGIELIQRIGRAILNIPRRIRQGFEEALL

SEQ ID NO: 528 - protein, 868 aa, Artificial
  HIV Env
MRAMGIQRNCQHLLRWGTMILGLVIICSVAGNLWVTVYYGVPVWKDAETTLFCASDAKAYETEKHNVWATHACVPTDPNPQEIHLKNVTEKFNMWKNYMVEQMHTDIISLWDQSLEPCVKLTPLCVTLECHYNITVKNITVSSNNNISISNSTEDMRNCSFNMTTELRDKQQKVYSLFYRLDLVKIDENKSNSSNSKYRLINCNTSAITQACPKVTFEPIPIHYCAPAGFAILKCNDKEFNGTGLCNNVSTVQCTHGIKPVVSTQLLLNGSLATKIMIRSENITNNAKTIIVQLVEPVEINCTRPNNNTRTSVPIGPGKVFYATGEIIGDIRQAHCNVSKSKWNATLQKVAIKLREYFDDKTIIFTKPSGGDLEITTHSFNCGGEFFYCNTSGLFNSTILNSTKMNDNASRESYDDTITLQCRIKQIINMWQRVGQAMYAPPIRGAIRCKSNITGLLLTRDGGNSNSSTNETFRPGGGDMRDNWRSELYKYKVVKIEPLGVAPTKAKRRVVEREKRAVGIGAVFLGFLGAAGSTMGAASITLTVQARQLLSGIVQQQSNLLRAIEVQQHLLKLTVWGIKQLQARVLAVERYLKDQQLLGIWGCSGKLICTTTVPWNSSWSNKSYDEIWDNMTWLQWDKEISNYTEIIYQLIEKSQNQQEKNEQDLMALDKWTNLWTWFSISNWLWYIRIFIMIVGGLIGLRIVFAVLAIINRVRQGYSPLSFQIHTPNPRDPDRPGRIEEEGGEQGRDRSIRLASGFLTLAWEDLRSLCLFSYHRLRDLILIAARTVELLGHSSLKGLRLGWEGLKYLWNLLLYWGRELKSSAINLVDTIAIAVAGWTDRIIEIGLRIGRAFLHIPRRIRQGFERALL

SEQ ID NO: 529 - protein, 854 aa, Artificial
  HIV Env
  misc_feature (545)..(545): Xaa can be any naturally occurring amino acid
MRVKGIQRNSQHLLRWGTMILGMIIICSTADKLWVTVYYGVPVWKDAETTLFCASDAKAYDTEVHNVWATHACVPTDPNPQELHLANVTEEFNMWKNSMVEQMHTDIISLWDQSLIPCVKLTPLCVTLECNDYNYNVTNSSHSYNVTNMQEMKNCSFNVTTELRDKRQKVTSLFYKLDVVPIGGNDTNSTQYRLINCNTSAITQACPKVTFEPIPIHYCAPAGFAILKCRDENFNGTGPCKNVSTVQCTHGIKPVVSTQLLLNGSLAREKVMIRSENITNNVKNIIVQLKEPVEINCTRPGNNTRKSIRIGPGQAFYATGEVIGDIRQAHCNVSRAKWNKTLHEVAKQLRTYFNNKTIIFTNSSGGDLEITTHTVNCGGEFFYCNTSGLFNSTWSSNASEPMSNSTESNDTITLQCRIRQIINMWQRAGKAIYAPPIPGIIKCVSNITGLILTRDGGSNNSTNETFRPGGGDMRDNWRSELYKYKVVKIEPLGVAPTKAKRRVVEREKRAIGIGAVFIGFLGAAGSTMGAASITLTVQARQLLSXIVQQQSNLLRAIEAQQHLLKLTVWGIKQLQARVLAVERYLKDQQLLGIWGCSGKLICTTNVPWNSSWSNKSQSEIWDNMTWLQWDKEISNYTQTIYRLIEESQNQQEKNEQDLLALDKWASLWNWFDISRWLWYIRIFIMIVGGLIGLRIVFAVLSVINRVRQGYSPLSFQIHTPNPGDLDRPGRIEEEGGEQDRGRSIRLVSGFLALAWDDLRSLCLFSYHRLRDFILIAARTVELLGQRGWEGLKYLWNLLVYWIRELKISAISLLDTIAIAVAGWTDRVIELGQRLCRAILHIPVRIRQGFERALL

SEQ ID NO: 530 - protein, 851 aa, Artificial
  HIV Env
MRVMGTQMNWQNLWRWGTMILGIIIICSAAENLWVTVYYGIPVWRDAETTLFCASDAKAYDTEVHNVWATHACVPTDPNPQEINLENVTEEFNMWKNNMVEQMHTDIISLWDQSLKPCVKLTPLCVTLNCSSVTNSSVTNITSDMAGEIKNCSFNMTTEIRDKRQKVHALFYRLDVVPMDNNNSLYRLINCNTSAITQACPKVSFEPIPIHYCAPAGFAILKCNDKEFNGTGPCKNVSSVQCTHGIRPVVSTQLLLNGSLAETEVMIRAENITNNIKNIIVQFNKSVEIICIRPNNNTRKSIRIGPGQAFYATGDIIGDIRQAYCDVNRTEWNEALQKVVNQLKTHFKNKTIIFNSSSGGDLEITTHSFNCGGEFFYCNTSGLFNSTWNGTDSMQKLNSTGNITLPCRIKQIINMWQRAGQAIYAPPIQGVIRCESNITGLILTRDGGNDNNESEIFRPGGGDMRDNWRSELYKYKVVKIEPLGVAPTKAKRRVVEREKRAIGIGAVFIGFLGAAGSTMGAASITLTVQARQLLSGIVQQQSNLLMAIEAQQHLLKLTVWGIKQLQAQVLAVERYLRDQQLLGIWGCSGKLICTTTVPWNSSWSDVSQSEIWENMTWLQWDKEISNYTQIIYSLIEESQNQQEKNEQDLLALDKWANLWNWFDISKWLWYIKIFIMIVGGLIGLRIVIAVISIINRVRQGYSPLSFQIHTPSPGGLDRPGRIEEEGGEQDRNRSIRLVNGFLALAWDDLRSLCLFCYRRLRDFILIVARTVELLGHSSLRGLRLGWEGLKYLKNLLSYWGRELKLSAINLLDTIAIVIAGWTDRVIEIGQGFCRAIFHPRRSKQGLKRALQ

SEQ ID NO: 531 - protein, 857 aa, Artificial
  HIV Env
MRVMGTQRNCQHLLNWGIMILGMIIICSTAENLWVTVYYGVPVWKDAETTLFCASDAKAYEKEVHNVWATHACVPTDPNPQELYLENVTEDFNMWKNNMVEQMHTDIISLWDQSLKPCVQLTPLCVTLNCSNNVTANTNSTSANLTDSVKGEMRNCSFNITTELRDKKKKVYSLFYKLDIVKINKNKSFRGKNSSGNSSSDRYRLINCNTSAITQACPKVSFEPIPIHYCAPAGFAILKCNEDEFNGTGTCRNVSTVQCTHGIRPVVSTQLLLNGSLAKEEVRIRSENISDNAKTIIVQFTKPVEIICTRPNNNTRKSIRIGPGQAFYGMGDIIGDIRKAHCNVSRSKWNETLKKVAIQLRKYWNTTIIFTNSSGGDLEITTHSFNCGGEFFYCNTSGLFNSSWNENDTKVNYNTESNDTITLQCRIKQIINMWQRTGQATYAPPIPGVIQCRSNITGLLLTRDGGVTNNTNNETFRPGGGDMRDNWRSELYKYKVVKLEPLGVAPTKAQRRVVKREKRAVGLAAVFFGFLGAAGSTMGAASITLTVQARQLLSGIVQQQNNLLRAIEAQQHMLRLTVWGIKQLQARVMAVERYLKDQQLLGIWGCSGKIICTTAVPWNSTWSNKSYTQIWDNMTWLQWDKEISNYTDIIYQLIEESQYQQEKNEKELLELDKWANLWNWFDISNWLWYIKIFIMIVGGLIGLRIVFAVLTVIKRVRQGYSPLSFQIHTPSPRDPDRPGRIEEEGGEQGRDRSIRLVSGFLALAWDDLRSLCRFSYHRLRDFISIATRIVELLGQGLKYLGNLLLYWIRELKISAISLFDTIAIAVAGWTDRVIEIGQRIGRAILHIPRRIRQGFER

SEQ ID NO: 532 - protein, 857 aa, Artificial
  HIV Env
MRVMGIERNYPCWWTWGIMILGMIIICNTAENLWVTVYYGVPIWKDANTTLFCASDAKAYDTEVHNVWATHACVPTDPSPQELKMENVTEEFNMWKNNMVEQMHTDIISLWDQSLKPCVQLTPLCVTLDCSYNITNNITNSITNSSVNMREEIKNCSFNMTTELRDKNRKVYSLFYKLDVVQINNGNNSSNLYRLINCNTSALTQARPKVTFEPIPIHYCAPAGYAILKCNDKEFNGTGLCKNVSTVQCTHGIRPVVSTQLLLNGSLAEGKVMIRSENITNNVKNIIVQLNESVTINCTRPNNNTRRSVRIGPGQTFYATGDIIGDIRQAHCNVSGSQWNKTLHQVVEQLRKYWNNNTIIFNSSSGGDLEITTHSFNCAGEFFYCNTSGLFNSTWVNGTTSSTSNGTITLPCRIKQIINMWQRVGQAMYAPPIQGVIKCESNITGLILTRDGGVNSSDSETFRPGGGDMRDNWRSELYKYKVVKIEPLGVAPTKARRRVVEREKRAVTLGAVFIGFLGTAGSTMGAASITLTVQARKLLSGIVQQQSNLLRAIEAQQHLLKLTVWGIKQLQARVLAVERYLRDQQLLGIWGCSGKLICPTNVPWNSSWSNKSLDEIWENMTWLQWDKEISNYTIKIYELIEESQIQQERNEKDLLELDKWASLWNWFDISKWLWYIKIFIMIVGGLIGLRIVFAVLSVINRVRQGYSPLSFQTHTPNPRGLDRPGRIEEEGGEQDRGRSIRLVSGFLALAWDDLRNLCLFSYHRLRDFILIAARTVELPGHSSLKGLRLGWEGLKYLGNLLLYWGRELKISAINLLDTIAIAVAGWTDRVIETVQRLGRAILNIPRRIRQGFERALL

SEQ ID NO: 533 - protein, 855 aa, Artificial
  HIV Env
MRVMGIQRNYPCLWRWGTMILGLIIICNAQQLWVTVYYGVPVWKDAVTTLFCASDAKAYDAEVHNVWATHACVPTDPNPQEIDLVNVTEEFNMWKNNMVDQMHEDIISLWDQSLKPCVKLTPLCVTLDCHNITINNTNNNTNITDGVREEMKNCSFNMTTELRDKKQKVYSLFYRLDIVQINKTDNNSYRLINCNTSTITQACPKVSFEPIPIHYCAPAGFAILKCKDPEFNGKGPCRNVSTVQCTHGIKPVVSTQLLLNGSLAEREIRIRSENFTNNAKTIIVQLVNPVKINCSRPYNTRKNIRRYSIGSGQAFYVTGKIIGDIRQAHCNVSRRDWNRTIQQVAEQLKKKFNNKTIIFASSSGGDIEITTHSFNCGGEFFYCNTSGLFNSIWNGSMSNDMGPNGTITLQCRIKQIINMWQRVGQAMYAPPIQGVIRCESNITGLLLTRDGGTNNTKNETFRPGGGDMRDNWKSELYKYKVVKIEPLGVAPTRAKRRVVEREKRAVGLGAIFLGFLGAAGSTMGAASITLTVQARQLLSGIVQQQSNLLRAIEAQQHLLKLTVWGIKQLQARVLAVERYLQDQQLLGIWGCSGKLICTTTVPWNSSWSNKSQEDIWNNMTWLQWEKEISSYTGIIYQLIEESQNQQEKNELDLLALDKWANLNWFNISNWLWYIRLFVIIVGGLIGLRIVFTVLSIINRVRQGYSPLSFQTLAPIPEGLGRPGRIEEEGGEQGKDRSIRLVSGFLAIAWDDLRNLCLFSYHRLRDFALIVARAVELLGRSSLKGLRLGWEGLKYLWNLLLYWGRELKISAITLLDAVAVAVAGWIDRVIEIGQTIGRAILNIPRRIRQGLERALL

SEQ ID NO: 534 - protein, 856 aa, Artificial
  HIV Env
MRVRGILRNYQQWWIWGSLGFWMLMVCNVVGNLWVTVYYGVPVWKDAETTLFCASDAKAYETEKHNVWATHACVPTDPNPQEIHLENVTEDFNMWKNSMVEQMHTDIISLWDQSLKPCVKLTPLCVTLNCSNVNGNSTGWGKEEIKNCSFNITTELRDKRQKVYSLFYRLDVVPIEEGQGNSSNSGYKEYRLINCNTSAITQACPKVTFNPIPIHYCTPAGYAILKCNEETFNGTGPCKNVSTVQCTHGIKPVVSTQLLLNGSLAEKEVIIRSENITNNVKNIIVQLAEPVRINCTRPNNNTRTSIRIGPGQTFYTSNIIGDIRQAHCNVSRAEWNKALNKIGKQLRKYFVNKTIKFANSSGGDLEITTHSFNCEGEFFYCNTSGLFNGTWNASMQESNSTESNETIILPCRIKQIINMWQRVGQAMYAPPIQGIIKCVSNITGLILTRDGKSSNSTDEIFRPGGGDMRDNWRSELYKYKVVKIEPLGVAPTRARRRAVGREKRAVGIGAVFLGFLGAAGSTMGAASITLTVQARQLLSGIVQQQSNLLRAIEAQQHLLKLTVWGIKQLQARVLAVERYLKDQQLLGIWGCSGKLICTTNVPWNASWSNKSQKEIWENMTWLQWDKEISNYTDIIYHLIKESQNQQEKNEQDLLALDKWADLWNWFDISNWLWYIKIFIMIVGGLIGLRIVFAVLSVINRVRQGYSPLSFRTHTPNPGGLDRPGRIEEEDGEQGKDRSIRLVSGFLALFWDDLRSLCLFSYHRLRDFILIAKRTVELLGHSSLKGLRLGWEGLKYLWNLLVYWGRELKISAIKLVDTIAIVVAGWTDRIIEIGQGIGRAILHIPRRIRQGLERALL

SEQ ID NO: 535 - protein, 860 aa, Artificial
  HIV Env
MRVMGTLMNYQNLWGWGTMILGMLTICSAANNLWVTVYYGVPVWKDAETTLFCASDAKAYDPEKHNVWATHACVPIDPDPQEIHLENVTEEFNMWKNNMVEQMHTDIISLWDQSLKPCVKLTPLCVTLECNNITNVNNTVNITDDMKGEIKNCSFNMTTELRDKKQRVYSLFYRLDIVQINSNSNNSSHNQYRLINCNTSAITQACPKVSFEPIPINYCAPAGFAILKCKDKKFNGTGPCKNVSTVQCTHGIKPVVSTQLLLNGSLAEEEIIIRSENITNNAKTIIVQLNETVQINCSRPNNNTRKSVHIGPGQAFYATGDVIGDIRQAYCTVNGTKWNRTLQKVAEKLSHYFENITTIIFKNSSGGDLEITTHSFNCGGEFFYCNTSGLFNSTWSKRNGTWQSNGTELNITLPCRIKQIINMWQRTGQAMYAPPIQGVISCVSNITGLLLTRDGGNNNTTTETFRPGGGDMRDNWRSELYKYKVVKIEPLGVAPTRAKRRVVEREKRAVGLGAVFIGFLGAAGSTMGAASITLTVQARQLLSGIVQQQSNLLRAIEAQQHLLKLTVWGIKQLQARVLALERYLRDQQLLGIWGCSGKLICTTNVPWNSSWSNKTQQEIWDNMTWQQWDKEIGNYTQIIYSLIEESQNQQEKNEQDLLALDKWANLWNWFDISNWLWYIKIFIMIVGGLIGLRIIFAVLSIVNRVRQGYSPLSFQTLIPNPRGPDRLGGIEEEGGEQDRGRSIRLVSGFLALAWDDLRSLCLFSYHRLRDLLLIAARTVELLGRSSLRGLQRGWETLKYLGNLVQYWGLELKRSAINLLDTTAIVVAEGTDRIIELIQRISRAIYNIPSRIRQGFEAALQ

SEQ ID NO: 536 - protein, 854 aa, Artificial
  HIV Env
MRVTGTQRSCQPWWIWGILGFWMLIICSATDKLWVTVYYGVPVWKEAKTTLFCASDAKAYEAEVHNVWATHACVPTDPNPHEINLENVTENFNIWKNYMVEQMHQDIISLWDQSLKPCVKLTPLCVTLNCRDATVTPNNATHNDSMVGDMKNCPFNMTTELRDKRRKEHALFYRLDIVPLDEGNSNSNESNNNYSDYRLINCNTSAITQACPKVSFDPIPIHYCAPPGFAILKCKDAKFNGIGPCNNVSTVQCTHGIKPVISTQLLLNGSLSETGVKIRSENITNNAKTIIVQLDEAVEINCTRPGNNTRRSVHIGPGQAFYATGDITGDIRKAHCIVNGTKWNKTLHKVVTQLRKYFVNKPIIFTPSSGGDVEVTTHSFNCRGEFFYCDTSGLFNSTWPFNSTNSTGPNGTITLQCRIKQIIRMWQRTGQAIYAPPIPGEINCVSNITGLLLTRDGGNNITNETFRPGGGDMQDNWRSELYKYKVVQIEPLGVAPTKARRRVVEREKRAVGMGAVFIGFLGAAGSTMGAASVTLTVQARQLLSGIVRQQSNLLRAIEAQQHLLKLTVWGIKQLQARILAVERYLKDQQLLGIWGCSGKIICTTNVPWNSSWSNKSLSKIWDNMTWLEWDKEISNYTQIIFDLIEESQIQQEKNEQDLLALDKWASLWNWFDISKWLWYIRIFIMIVGGLIGLRIVFAVLSIINRVRQGYSPLSFQIHTPNPGGPDRPGRTEEEGGEQDRDRSIRLVSGFLALAWDDLRSLCLFSYHRLRDFILILGHSSLKGLRLGWEGLKYLWNLLLYWGRELRISAINLLDTIAIATASWTDRVIELGQRICRAILNIPRRIRQGFERALL

SEQ ID NO: 537 - protein, 853 aa, Artificial
  HIV Env
MRVMGIQRNWQHLLRWGTMILGMILICSAVDKLWVTVYYGVPVWKDAETTLFCASDAKAYDTEVHNVWATHACVPTDPNPQEVLLGNVTEDFNMWKNNMVEQMHTDIISLWDQSLQPCVKLTPLCVTLNCTNVTITTNATDSNNASLQDMAKEMTNCSFNMTTELRDKKQRVYSLFYKLDVVQINSNQNNSSQYRLINCNTSAITQACPKVSFEPIPIHYCAPAGFAILKCNNKEFNGTGPCKNVSTVQCTHGIKPVVSTQLLLNGSLAEEEIIVRSENLTNNAKIIIIQLNETVKINCTRPNNNTRNSIRIGPGQAFYATGAITGDIRQAHCNVSRSEWNKTLQQVAKKLGDPLNKTEIIFKPPSGGDLEITTHSFNCGGEFFYCNTSGLFNSTWVNGSRESNSTDNDTITLPCRIKQIINMWQRVGQAMYALPIRGVIRCESNITGLILTRDGGNNTSTNETIRPAGGDMRDNWRSELYKYKVVKIEPLGVAPTKARRRVVEREKRAVGIGAVFLGFLGAAGSAMGAAAATLTVQARQLLSGIVQQQSNLLKAIEAQQHLLKLTVWGIKQLQARVLAVERYLKDQQLLGIWGCSGKLICATNVPWNSSWSNKSQAEIWQNMTWLQWDKEIDNYTQIIYMLLEEPQNQQEKNEQDLLALDKWGSLWNWFEISKWLWYIRIFIMIVGGLIGLRIVFAVLSVINRVRQGYSPLSFQTHTPNPEGVDRPGRIEEEGGEQGRDRSIRLVSGFLALAWDDLRSLCLFSYHRLRDLILIAARIVELLGRRGWEAIKYLWNLLQYWIQELKNSAINLFNTIAIAVAEGTDRVIEIGQRIGRAILNTPRRIRQGLERALL

SEQ ID NO: 538 - protein, 853 aa, Artificial
  HIV Env
MRVKGIQRNYQQWWTWGSLGLWMLLICNVMGNLWVTVYYGVPVWKEAKTTLFCASDAKAYETEAHNVWATHACVPTDPSPQEIELKNVTENFNMWKNDMVDQMHQDIISLWDESLKPCVKLTPLCVTLNCSNVTAINSNGTAINITESIKGEMKNCSFKATTEIKDKKKKEYALFYRLDILPLNKENKGSSGKYRLINCNTSAITQACPKVSFDPIPIHYCAPAGFAILKCNNKTFNGTGPCNNVSTVQCTHGIKPVVSTQLLLNGSLAEKVVIRSENITNNAKTIIVQFDSPVKINCTRPGNNTRKSVRIGPGQTFYATGDIIGDIRQAHCNISGKEWNKTLQAVGKKLAEYYPNKTINFTQASGGDLEIVTHSFNCGGEFFYCNTSGLFNSTYNPSYNSTESVNETTIILPCKIKQIINMWQEVGRAMYANPIAGNITCNSNITGLLLTRDGGVNETTETEIFRPGGGNMKDNWRSELYKYKVVEIKPLGVAPTKAKRRVVEREKRAVGIGAVFLGFLGAAGSTMGAASITLTVQARQLLSGIVQQQSNLLRAIEAQQHMLQLTVWGIKQLQTRVLAIERYLQVQQLLGIWGCSGKLICTTSVPWNSSWSNKSQGEIWDNMTWMQWDREISNYSDTIYRLLEESQNQQEQNEKDLLALDKWQNLWSWFNISNWLWYIKIFIMIVGGLIGLRIIFAILSIVNRVRQGYSPLSFQTLIPNPRGPDRPGEIEEGGGEQDRDTSTRLVSGFFALAWDDLRSLCIFLYHHLRDLLLIATRAVELLGQRGWEALKLLGNILLYWSQELKNSAINLLDTIAIAVANWTDRVIEIGQRAGRAFLNIPRRIRQGFERALL

SEQ ID NO: 539 - protein, 840 aa, Artificial
  HIV Env
MRVRGIEMNYQNLWRWGTLLLGMLMTCSVTGRLWVTVYYGVPVWRDAETTLFCASDAKAYDAEVHNVWATHACVPTDPNPQEINLENVTEEFNMWKNNMVEQMHTDIISLWDQSLKPCVQLTPLCVTLNCNNVTNKINETSMNGEIKNCSFNMTTELRDKEQQVHSLFYKLDVVQMGNSNSSQYRLINCNTSAIKQACPKVTFEPIPIHYCAPAGFAILKCKDTEFNGTGPCKNVSTVQCTHGIKPVVSTQLLLNGSLAEGKVRIRSENITDNTKNIIVQFTEPVTINCTRPNNNTRKSVRIGPGQALYVTGGIIGDIRQAFCEVNRTKWDKTLREVAIQLKHYYGNKTVIFANSSGGDIEITTHSFNCRGEFFYCNTTGLFNSTWNDTATEQKPNDTIRLQCRIKQIINMWQRAGRAIYAPPIQGVINCVSDITGLILTRDGGVNNTNETFRPGGGDMRDNWRSELYKYKVVKIEPLGVAPTRAKRRVVEREKRVAGLGAVFIGFLGAAGSTMGAASITLTVQARQLLSGIVQQQNNLLKAIEAQQHLLKLTVWGIKQLQARVLAVERYLKDQQLLGIWGCSGKLICTTNVPWNSTWSNKSQEEIWDNMTWLQWDKEISNYTQTIYNLLAESQNQQEKNEQDLLALDKWANLWSWFDISNWLWYIKIFIMIVGGLIGLRIVFAVLSLVNRVRQGYSPLSFQTLLPAPRGPDRPEGIEEEGGEQGRGRSIRLVNGFSALIWDDLRNLCLFSYHRLRDLLLIALRIVELLGRRGWEALKYLWNLLQYWIQELKNSAISLVDTTAIAVAEGTDRVIETVQRAFRAVLRIPARIRQGLERVLL

SEQ ID NO: 540 - protein, 858 aa, Artificial
  HIV Env
MRVMGIQRNCQNLLTWGTMILGMIIICSVAENLWVTVYYGVPVWKDAETTLFCASDAKAYETEKHNVWATHACVPTDPNPQEIHLENVTENFNMWKNNMVKQMHTDIISLWDQSLQPCVKLTPLCVTLHCNDTNVTNATNITNANTITGEMKNCSFNMTTELMDKKRKVYSLFYKLDVVQINENQYNSSNNSNKEYRLINCNTSAITQACPKVTFEPIPIHYCAPAGFAILKCKDEKFNGTGPCKNVSTVQCTHGIKPVVSTQLLLNGSLAKEEVIIRSENITNNAKNIIVQFVKPVTINCTRPNNNTRKSVHMGPGKVFYATGDIIGDIRQAHCNVSKSAWNNTLQQVVIQLRRYFNNKTIIFTNSSGGDLEITTHSFNCGGEFFYCNTSGLFNSTWNNTDSMQESHSTETNDTITLPCRIKQIINMWQRVGQAMYAPPIQGVIKCTSNITGLILTRDGGGNNSINATFRPGGGDMRDNWRSELYKYKVVKIEPVGIAPNRAKRRVVEREKRAVGIGVVFFGFLGAAGSTMGAASITLTVQARQLLSGIVQQQSNLLRAIEAQQHLLKLTVWGIKQLQARVLALERYLKDQQLLGIWGCSGKLICPTTVPWNSSWSNKSWSEIWNNMTWLQWDKEINNYTHIIYQLIEESQNQQEMNEQDLLQLDKWASLWNWFDITNWLWYIRIFIIIVGGLIGLRIVFAVLSLINRVRQGYSPLSFQTHTPNPRDLDRPERIEEGGGEQDRTRSIRLVSGFLAIAWDDLRSLCLFSYHRLRDLILIAARIVELLGRRGWEALKYLWNLLQYWIQELKISAISLVDSIAIVVAGWTDRVIEIGQGIGRAILHIPRRIRQGLERALL

SEQ ID NO: 541 - protein, 847 aa, Artificial
  HIV Env
  misc_feature (347)..(347): Xaa can be any naturally occurring amino acid
  misc_feature (449)..(449): Xaa can be any naturally occurring amino acid
  misc_feature (481)..(483): Xaa can be any naturally occurring amino acid
  misc_feature (491)..(491): Xaa can be any naturally occurring amino acid
  misc_feature (615)..(615): Xaa can be any naturally occurring amino acid
  misc_feature (646)..(646): Xaa can be any naturally occurring amino acid
  misc_feature (733)..(733): Xaa can be any naturally occurring amino acid
  misc_feature (845)..(845): Xaa can be any naturally occurring amino acid
MKVMGTQRNYPNWWRWGVLILGMLLICSTTGNLWVTVYYGVPVWKEAKTTLFCASDAKAYDTEMHNVWATHACVPTDPSPQEIVLENVTENFNMWENNMVDQMHTDIISLWDQSLKPCVKLTPLCVTLNCTDPANHTDTTNNTSIQPSQPSANCSFNVTTAIRDKQQKVHALFYRVDLVSIDNNDNNTQYRLINCNTSVITQACPKVTFEPIPIHYCAPAGFAILKCNNKTFSGTGPCKNVSTVQCTHGIKPVVSTQLLLNGSLAEKVIIRSKNITDNTKNIIVHFNESVQINCTRIANNTRKSIHIGPGQAFYAAEPVIGDIRQAHCNISEGSWMKTLHKVATQLXQHFSNKTIIFNASAGGDIEITTHSFNCAGEFFYCNTSQLFNSTWNHTSTYNSTENGTITLPCKIKQIVNMWQRVGQAMYAPPIKGNITCVSNITGLILTIDXGNMSAENFTFRPGGGDMRDNWRSELYKYKVVXXXPLGVAPTXARRRVVQREKRAVGMGAFFLGFLGAAGSTMGAASITLTVQARQLLSGIVQQQSNLLKAIQAQQHMLQLTVWGIKQLQARVLAVERYLKDQQLLGIWGCSGKLICTTNVPWNSSWSNKSLNDIWXNMTWMEWDKQISNYSEEIYRLLEVSQIQQEXNEQDLLALDKWASLWNWFDISKWLWYIKIFIMIVGGVIGLRIVFAVLSIVNRVRQGYSPLSFQTLIPNPRGADRPEGIEEEGGEQDXNRSIRLVNGFLPLVWEDLRNLCLFSYRLLRDLLLILARTVTLLGSRGWETLKYLGNLLLYWGQELKNSAINLLNTTAIAVAEGTDRIIEIVQRTGRAVLHIPRRIRQGFERXLL

SEQ ID NO: 542 - protein, 859 aa, Artificial
  HIV Env
MRVREIQRNYQNWWRWGMMLLGMLMTCSIAEDLWVTVYYGVPVWKEATTTLFCASDAKSYETEVHNIWATHACVPTDPNPQEIELENVTEGFNMWKNNMVEQMHEDIISLWDQSLKPCVKLTPLCVTLNCTNVNGTAVNGTNAGSNRTNAELKMEIGEVKNCSFNITPVGSDKRQEYATFYNLDLVQIDDSDNSSYRLINCNTSVITQACPKVTFDPIPIHYCAPAGFAILKCNDKKFNGTEICKNVSTVQCTHGIKPVVSTQLLLNGSLAEEEIMIRSENLTDNTKNIIVQLNETVTINCTRPGNNTRRGIHFGPGQALYTTGIVGDIRRAYCTINETEWDKTLQQVAVKLGSLLNKTKIIFNSSSGGDPEITTHSFNCRGEFFYCNTSKLFNSTWQNNGARLSNSTESTGSITLPCRIKQIINMWQKTGKAMYAPPIAGVINCLSNITGLILTRDGGNSSDNSDNETLRPGGGDMRDNWISELYKYKVVRIEPLGVAPTKAKRRVVEREKRAIGLGAMFLGFLGAAGSTMGAASLTLTVQARQLLSGIVQQQNNLLRAIEAQQHLLQLTVWGIKQLQARVLAVERYLQDQRLLGMWGCSGKHICTTFVPWNSSWSNRSLDDIWNNMTWMQWEKEISNYTGIIYNLIEESQIQQEKNEKELLELDKWASLWNWFSISKWLWYIRIFIIVVGGLIGLRIIFAVLSLVNRVRQGYSPLSLQTLLPTPRGPPDRPEGIEEEGGEQGRGRSIRLVNGFSALIWDDLRNLCLFSYHRLRDLLLIATRIVELLGRRGWEALKYLWNLLQYWGQELKNSAISLLNTTAIAVAECTDRVIEIGQRFGRAILHIPRRIRQGFERALL

SEQ ID NO: 543 - protein, 857 aa, Artificial
  HIV Env
MRVRGTQMSWPHLWNGGILILGLVIICSASNNLWVTVYYGVPVWEDADTTLFCASDAKAYSTESHNVWATHACVPTDSNPQEIPLENVTENFNMWKNNMVDQMHEDIISLWDESLKPCVKLTPLCVTLTCTNVNCTNNSTREIRGKNCSLDTEVGELKNCSFNITTELRDKKKTEHALFYRPDVVPINNDNSSYMLINCNSSTIKQACPKVSFEPIPIHYCAPAGFAILRCRDKKFNGTEPCKNVSTVQCTHGIKPVVSTQLLLNGSLAEEEIIVRSENFTNNAKVIIVQLKEPIEINCTRPNNNTRKSIGLGPGQAFYATGDIIGDIRQAHCNVSGKDWGKMLQEVSRQLKKFFNNKTIFFNSSAGGDLEITTHSFNCRGEFFYCNTSALFNFSSETNSTFPNTTLTLPCRIKQIVRMWQRVGQAMYAPPIAGKITCRSNITGLILTRDGGNPNNTNNETFRPGGGDMRDNWRSELYQYKVVKIKSLGVAPTKARRRVVEREKRAVGLGAVFLGFLGAAGSTMGAASITLTVQVRQLLSGIVQQQSNLLRAIEAQQHMLQLTVWGIKQLQARVLAVERFLKDQQLLGIWGCSGKLICTTNVPWNVSWSNKSYNDIWNNMTWIEWEREISNYTQQIYNLLEESQNQQEKNEQDLLSLDKWASLWTWFDIANWLWYIRIFIMIVGGLIGLRVVFAVLNVINRVRQGYSPLSFQILTPHQRDPDRPGRIEEGGGEQDRDTSRRLVGGFLTLVWDDLRSLCLFSYHRLRDLVLIAARTLELLGRSGLRGLRLGWEGLKYLWNLLVYWGQELKNSAINLLDTVAIAVANWTDRVIEIGQRAGRAILNIPRRIRQGLERALL

SEQ ID NO: 544 - protein, 845 aa, Artificial
  HIV Env
MRVKGTQRNWQHLWTWWTLILGLVIICSASNNLWVTVYYGVPVWEDADTPLFCASDAKAYSTERHNVWATHACVPTDPNPQEITLENVTETFNMWKNNMVEQMHEDIISLWDESLKPCVKLTPLCVTLNCTNVNCNSNVTSTGNSAGTNATCNIEEANNLKNCSFNITTEIRDKKKTEYALFYRLDVVPIDGNNNVSNNYRLINCNVSTIKQACPKVSFDPLPIHYCAPAGFAILKCRGKNFTGTGQCKNVSSVQCTHGIKPVVSTQLLLNGSLAEGEIVIRSENLTDNAKVIIVQLNKTIGINCTRPNNNTRKSIRIGPGQAFYATGEIIGQEWQEMLQKVQAQLEQVFNKSITFNSSAGGDLEITTHSFNCRGEFFYCNTSGLFNESGGNDTTITLPCKIKQIVRMWQRVGQAMYAPPIAGDITCRSNITGLLLTRDGGVNNTGNETFRPGGGDMRDNWRSELYKYKIVKIKPLGIAPTKARRRVVERGKRAVGLGAVFLGFLGAAGSTMGAGSITLTVQVRQLLSGIVQQQSNLLRAIEAQQHLLQLTVWGIKQLQARVLAVERYLKDQQLLGIWGCSGKLICTTNVPWNTSWSNKSYEEIWDNMTWIQWEREVSNYTQQIYSLIEESQNQQEKNEQDLLALDKWASLWNWFDITKWLWYIKIFIMIVGGLIGLRIVFAVLSIVNRVRQGYSPLSFQTLTHHQREPDRPERIEEGGGEQDRDRSVRLVSGFLALAWDDLRNLCLFSYHRLRDLVLIAARTAELLRRSSLQGLRLGWEGLKYLWNLLLYWGRELKNSAINLIDTIAIAVANWTDRVIEVAQGACRAILNIPRRIRQGLERALL

SEQ ID NO: 545 - protein, 846 aa, Artificial
  HIV Env
MRVMETQRNYPRLWRWGTIILGMLMICNAKENLWITVYYGVPVWRDAKTSLFCASDAKSYSTESHNVWATHACVPTDPNPQEINLENVTENFNMWKNNMVEQMHTDIISLWDQSLKPCVQITPLCVTLECSKINITNNSTDKANVTNNDAEMRNCSFNITTEIRDRKKKEYALFYKHDLVPITNETKTFILIHCNTSTITQACPKVSFDPIPIHYCAPAGFAILKCKDKAFNGTGPCKNVSTVQCTHGIRPVVTTQLLLNGSLAEGEIIIRSENITENTKNIIVQLNETVEINCTRPNNNTRKGIRIGPGRVIYATSAITGDIRQAHCNISKEQWNRTLERVKEKLGRHFKNKTITFKPASGGDPEVTMHIFNCRGEFFYCNTTKLFNDTENKNNDAENKTITLPCRIRQIVNMWQRVGRAMYAPPIAGNITCRSNITGIILTRDGGSNNESTNETFRPGGGDMRDNWRSELYKYKVVKIEPLGVAPTRARRRVVEREKRAIVGVGAVFLGFLGVAGSTMGAASITLTVQARQLLSGIVQQQSNLLKAIEAQQHLLQLTVWGIKQLQARVLAIERYLKDQQLLGIWGCSGKLICTTNVPWNSSWSNKSQEDIWSNMTWMQWEKEISNYTNTIYWLLEESQNQQEKNEQELLALDKWASLWSWFDISKWLWYIRIFIMIVGGLIGLRIFFAVLSMVNRVRQGYSPLSFQTLFPNQREPDRPEGIEEEGGEQGRSRSIRLVNGFLPLIWEDLRNLCLFSYRHLRDLLLIVARTVELLGKRGWGALKYLWNLLLYWGQELKSSAISLLDAVAIAVANWTDRVIEVVQRVGRAILNIPRRIRQGLERALI

SEQ ID NO: 546 - protein, 852 aa, Artificial
  HIV Env
MKVKGIQRNCQHLWKWGTFILGLVIICSAAENLWVTVYYGVPVWKDAETTLFCASDAKAYDTEKHNVWATHACVPTDPNPQELSLGNVTEKFNMWKNNMVEQMHEDVISLWDQSLKPCVKLTPLCVTLSCSDIRNSTESNITAEMQGEIKNCSYNMTTELRDKQRKIYSLFYRLDIVPIEENSSNGNSSEYRLINCNTSAITQACPKVSFEPIPIHYCAPAGFAILKCRDEEFEGKGPCRNVSTVQCTHGIKPVVSTQLLLNGSLAEKEVRIRSENFSDNAKIIIVQLAKPVNITCMRPNNYTRKSIHIGPGRALYPEGDIIGDIRQAHCNVSRKEWSETLSKVAAQLRKHFVNTRTDIIFANSSGGDVEITTHSFNCGGEFFYCNTSGLFNSTWKNSTSINDTVSNGTITLPCRIKQIVNMWQRVGQAMYAPPIKGVIKCESNITGILLTRDGVGNNTANETFRPGGGDMRDNWRSELYKYKVVKIEPLGVAPTKAKRRVVAREKRAIGMGAFFLGFLGAAGSTMGAASITLTVHVRQLLSGIVQQQSNLLRAIEAQQHLLKLTVWGIKQLQARILAVERYLKDQQLLGIWGCSGKIICPTNVPWNSSWSNKSQSDIWDKMTWLEWDKEVSNYTQVIYNLLEESQTQQEINERDLLALDKWANLWNWFDISNWLWYIKIFIMIVGGLIGLRIVFAVLSIINRVRQGYSPLSFQTLTHHQREPDRPEGIEEGGGEQDRDRSIRLVSGFLPLAWDDLRSLCLFCYHRLRDCALIAARIVETLIRRGWETLKYLGNLVIYWGQELKNSAINLLDTVAIAVADWTDRVIEVVQRAGRAFLNIPRRIRQGLERALL

SEQ ID NO: 547 - protein, 851 aa, Artificial
  HIV Env
MRVMETLMNCTNLWRWGLMIFGMLMTCSATGNMWVTVYYGVPVWKEAKTTLFCASNAKAYSTEGHNIWATHACVPTDPNPQEIILENVTENFNIWKNDMVEQMQEDIISVWDESLKPCVKLTPLCVTLNCTNATVSNTGCTNNNCTVSEMKECHFNITGGGRRKKEYALFYKEDIALIKDRPNNSNYSEYILVKCNTTVIKQACPKVSFQPIPIHYCAPAGFAILQCNDKKFNGTGPCKNVSTVQCTHGIKPVVSTQLLLNGSIAEEEIIIRSENITNNAKTIIVQLNNTVEIKCVRPANNTRKGIHTGPGQVLYATGAVVGDIRQAHCNVSRKNWTDTLHKVTAKLKEYFNTTIEFQPASAGDLEIMTHTFNCGGEFFYCNTSGLFNKSLLNETSNETTDGANNTITLTCRIKQIVRMWQRVGQAIYAPPIAGNITCTSNITGLLLTRDGGYTNNTNGTEIFTPTGRNMRDNWRSELYKYKVVKIEPIGVAPTRAKRRVVGREKRAVGIMGAMFLGFLGTAGSTMGAASITLTVQARQLLSGIVQQQSNLLKAIEAQQHLLRLTVWGIKQLQAKILAVERYLQDQQLLGIWGCSGKFICTTTVPNSSWSNKSYNEIWENMTWRDWEREIDKYTDTIYSLIGEAQSQQDKNEQDLLSLDKWASLWNWFSISNWLWYIRIFIMIVGGLIGLRIIFAVLAIVNRVRQGYSPLSLQTLIPNPTEVDRPGGIEEGGGEQGKTRSIRLVNGFLALAWEDLRNLCLFSCHRLRDFALIAARTVDTLGRRGWEILKYLGNLALYWGRELKNSAISLLDTIAITVAEATDRIIEIAQRAFRAILHIPVRIRQGFERALL

SEQ ID NO: 548 - protein, 859 aa, Artificial
  HIV Env
MKVKETKRNWQRLWRWGIMLLGMLMICSATEKLWVTVYYGVPVWKEATTTLFCASDAKAYDKEVHNVWATHACVPTDPNPQEILLENVTEEFNMWKNNMVEQMHEDIISLWDQSLKPCVQLTPLCVTLNCTDELTNVTFTNSRHVTNSSYVGSMEKGEMKNCSFNITTSIRDKRHKEFALFYKLDVVQIDGSNTSYRLINCNTSVITQACPKVSFEPIPIHYCAPAGFAILKCNNKTFNGKGPCANISTVQCTHGIRPVVSTQLLLNGSLAEKEIVIRSDNFTDNAKSIIVQLNESVEIHCMRPNNNTRKGIYVGPGRHIYATEKIVGDIRQAHCNISRTNWTSVLRQIAVKLRERFKNKTIVFNHSSGGDPEIVRHSFNCGGEFFYCNSTQLFNSTWFNSTGNDTERATNNTENITLPCRIKQIINMWQKVGKAMYAPPINGQIRCSSNITGLILTRDGGNQENKTEIFRPGGGDMRDNWRSELYKYKVVRIEPLGVAPTKAKRRVVQREKRAVGMIGAMILGFLGAAGSTMGAASLALTVQTRQLLSGIVQQQNNLLRAIEAQQHLLQLTVWGIKQLQARILAVERYLEDQQLLGIWGCSGKLICTTSVPWNASWSNKSLSDIWDNMTWMQWEREIGNYTGLIYHLLEESQNQQEKNEQELLALDKWASLWNWFSITKWLWYIKIFIMIVGGLVGLRIVFAVLSLVKKVREGYSPLSLQIRPPAPRGPDRPEGIEEEGGEQDRDKSVRLVDGFLALIWDDLRSLCLFSYHRLRDLLLIAARIVELLGRRGWEALKYWWNLLQYWSQELQNSAISLLNATAIAVAEGTDRVIEVVQRACRAILHIPRRIRQGLERLLL

SEQ ID NO: 549 - protein, 845 aa, Artificial
  HIV Env
MRVTGIRKNYQHLWRWGTMLLGMLMICNAAENLWVTVYYGVPVWKEATTTLFCASDAKAYDTEVHNVWATHACVPTDPNPQEVVLGNVTENFNMWKNNMVEQMHEDIISLWDQSLKPCVKLTPLCVTLNCTNLKNATNTSSTMEGGEIKNCSFNITTSIKTKVKDYALFYKVDVVPIGNDSTSYRLINCNTSVITQACPKVSFEPIPIHYCTPAGFAIIKCNNKKFNGTGPCTNVSTVQCTHGIRPVVSTQLLLNGSLAEEEVVIKFSNFTDNARVIIVQLNESVEIKCIRPNNNTRKSIHLGPGKAWYTTGQIIGDIRQAHCNLSSTKWNNTLKQITKKLREQFGNKTIVFNQSSGGDPEIVMHSFNCGGEFFYCNTSQLFNSTWNDTGTWNDTTGNSTITLPCRIKQIVNMWQEVGKAMYAPPIEGQIRCSSNITGLLLTRDGGNNESKPTETFRPGGGDMRDNWRSELYKYKVVKIEPLGVAPTKARRRVVQREKRAVGTIGAMFLGFLGAAGSTMGAASITLTVQARQLLSGIVQQQRNLLRAIEAQQHLLQLTVWGIKQLQARVLAVERYLKDQQLLGIWGCSGKLICTTAVPWNASWSNKSLHEIWNNMTWMEWEREIDNYTREIYTLIEESQNQQEKNELELLELDKWASLWNWFDITKWLWYIKIFIMIVGGLVGLRIVFAVLSIVNRVRQGYSPLSLQTRFPAQRGPGRPEGIEEEGGERDRDRSERLVTGFLSLIWEDLRSLCLFSYHRLRDLLLIVARIVELLGRRGWEVLRYWWNLLQYWIQELKNSAIGLLNATAIAVAEGTDRVIEVVQRAYRAILHIPTRIRQGLERALL

SEQ ID NO: 550 - protein, 850 aa, Artificial
  HIV Env
MKVKEIRKNYQHLWRWGTMLLGMLMICSATEKLWVTVYYGVPVWKEATTTLFCASDAKAYDKEVHNVWATHACVPTDPDPQEVVLENVTEDFNMWKNNMVEQMHEDIISLWDQSLKPCVKLTPLCVTLNCTDLKNATNTNNSSWTMTGEMKGEIKNCSFNITTSIRDKVQKEYAHFYKLDVVPIDNDNTSYRLISCNTSVITQACPKVSFEPIPIHYCTPAGFAMLKCKDKRFNGKGQCKNVSTVQCTHGIRPVVSTQLLLNGSLAEEEVVIRSDNFTDNAKTIIVQLKESVEINCTRPNNYTSKRIRIGARRAFYTKGKIIGDIRQAHCNISGAKWDSTLRQIVKKLRERFGNKTIVFNQSSGGDPEIVTHSFNCGGEFFYCNSAQLFNSTWNDTKESNNTNGTITLPCRIKQIINMWQEVGKAMYAPPISGQIRCSSNITGLLLTRDGGKNKDNETETFRPGGGNMRDNWRSELYKYKVVKIEPLGVAPTKAKRRVVQREKRAVGLLGAVFLGFLGAAGSTMGARSMALTVQARQLLSGIVQQQNNLLRAIEAQQHLLQLTVWGIKQLQARVLAVERYLRDQQLLGIWGCSGKLICTTAVPWNASWSNKSMDMIWNNMTWMEWEREIDNYTSLIYTLIEESQNQQEKNEQELLELNKWENLWSWFDISNWLWYIKIFIMIVGGLVGLRIVFAVLSIVNSVRQGYSPLSFQTRLPAPRGPDRPEGIEEEGGDRDRDRSNRLVKGFLALIWDDLSSLCLFLYHRLRDLLLIAARIVELLGRRGWEVLKYWWNLLQYWSQELKNSAVSLLNATAIAVAEGTDRVIEVVQRAWRAILHIPVRIRQGLERALL

SEQ ID NO: 551 - protein, 855 aa, Artificial
  HIV Env
MKVKETRKNYQRLWRGGTLLLGMLMISSVAGNLWVTVYYGVPVWKEATTTLFCASDAKAYDTEVHNVWATHACVPTDPNPQEVVMGNVTENFNMWKNDMVEQMQEDIISLWDQSLKPCVKLTPLCVTLKCTDYNNATNSSWGRMEKGEIQNCSFKVTTNIRDKVQKESALFYKTDVVPIDNNKTSNRDNTTSYMLIHCNRSVITQACPKVSFEPIPIHYCAPAGFAILKCNDKKFNGKGPCKNVSTVQCTHGIRPVVSTQLLLNGSLAEKEVVIRSDNFTDNTKTIIVHLNESVEINCTRPNNNTRKGIHIGPGRAVYTTGRIVGDIRLAHCNISRARWNKTLNQIFRKLREIRQFENKTIVFNRSSGGDPEIVMHSFNCGGEFFYCNSTKLFNSTWNNTSTWNDNGNDTIILPCRIKQIINMWQEVGKAMYAPPIGGLIRCSSNITGLILTRDGGNDNSSTTEIFRPGGGNMRDNWRNELYKYKVVKIEPLGVAPTKAKRRVVQREKRAVGMLGAMFLGFLGAAGSTMGARSLTLTVQARQLLSGIVQQQNNLLRAIEAQQHLLQLTVWGIKQLQARVLAVERYLRDQQLLGIWGCSGKLICTTTVPWNASWSNKTLDQIWNNMTWMEWEREIDNYTSLIYTLIEQSQNQQEKNEQELLELDKWASLWSWYDISNWLWYIKIFIMIVGGLIGLRIVFAVLSIVNRVRQGYSPLSFQTLLPATRGPRQPEEIEEEGGERDRGRSVRLVSGFLALFWDDLRSLCLFSYRRLRDLLLIVAKIVETLGRRGWEVLKYWWNLLQYWSQELKNSAVSLFNTIAIAVAEGTDRVIEVVQRACRAILHIPRRVRQGLERALL

SEQ ID NO: 552 - protein, 856 aa, Artificial
  HIV Env
MRVKEKYQHLWRWGWRWGTMLLGMLMICSATEKLWVTVYYGVPVWKEATTTLFCASDAKAYDTEVHNVWATHACVPTDPNPQEVVLVNVTENFNMWKNDMVEQMHEDIISLWDQSLKPCVKLTPLCVSLKCTDLKNDTNTNSSSGRMIMEKGEIKNCSFNISTSIRGKVQKEYAFFYKLDIIPIDNDTTSYKLTSCNTSVITQACPKVSFEPIPIHYCAPAGFAILKCNNKTFNGTGPCTNVSTVQCTHGIRPVVSTQLLLNGSLAEEEVVIRSVNFTDNAKTIIVQLNTSVEINCTRPNNNTRKRIRIQRGPGRAFVTIGKIGNMRQAHCNISRAKWNNTLKQIASKLREQFGNNKTIIFKQSSGGDPEIVTHSFNCGGEFFYCNSTQLFNSTWFNSTWSTEGSNNTEGSDTITLPCRIKQIINMWQKVGKAMYAPPISGQIRCSSNITGLLLTRDGGNSNNESEIFRPGGGDMRDNWRSELYKYKVVKIEPLGVAPTKAKRRVVQREKRAVGIGALFLGFLGAAGSTMGAASMTLTVQARQLLSGIVQQQNNLLRAIEAQQHLLQLTVWGIKQLQARILAVERYLKDQQLLGIWGCSGKLICTTAVPWNASWSNKSLEQIWNHTTWMEWDREINNYTSLIHSLIEESQNQQEKNEQELLELDKWASLWNWFNITNWLWYIKLFIMIVGGLVGLRIVFAVLSIVNRVRQGYSPLSFQTHLPTPRGPDRPEGIEEEGGERDRDRSIRLVNGSLALIWDDLRSLCLFSYHRLRDLLLIVTRIVELLGRRGWEALKYWWNLLQYWSQELKNSAVSLLNATAIAVAEGTDRVIEVVQGACRAIRHIPRRIRQGLERILL

SEQ ID NO: 553 - protein, 855 aa, Artificial
  HIV Env
MTARGTRKNYQRLWRWGTMLLGMLMICSAAENLWVTVYYGVPVWKEATTTLFCASDARAYATEVHNVWATHACVPTDPNPQEVVLGNVTENFDMWKNNMVEQMQEDIISLWDQSLKPCVKLTPLCVTLDCTDVNTTSSSLRNATNTTSSSWETMEKGELKNCSFNTTTSIRDKMQEQYALFYKLDVLPIDKNDTKFRLIHCNTSTITQACPKISFEPIPMHYCTPAGFAILKCNDKKFNGTGPCTNVSTVQCTHGIKPVVSTQLLLNGSLAEEEVIIRSSNFTNNAKIIIVQLNKSVEINCTRPNNNTRNRISIGPGRAFHTTKQIIGDIRQAHCNLSRATWEKTLEQIATKLRKQFRNKTIAFDRSSGGDPEIVMHSFNCGGEFFYCNTSQLFNSTWNDTTRANSTEVTITLPCRIKQIVNMWQEVGKAMYAPPISGQIRCSSKITGLLLTRDGGKNTTNGIEIFRPAGGDMRDNWRSELYKYKVVKIEPLGVAPTKARRRVVQREKRAVGMLGAMFLGFLGAAGSTMGARSMTLTVQARQLLSGIVQQQNNLLRAIEAQQHLLQLTVWGIKQLQARVLAVERYLKDQQLLGIWGCSGKLICTTTVPWNASWSNKSLNEIWDNMTWMQWEREIDNYTHLIYTLIEESQNQQEKNEQELLELDKWAGLWSWFSITNWLWYIRIFIIIVGGLVGLRIVFAVLSIVNRVRQGYSPLSFQTRLPTQRGPDRPEGIEEEGGERDRDRSGRLVDGFLALIWDDLRSLCLFSYHRLRDLILIVARIVELLGRRGWEVLKYWWNLLQYWSQELKNSVISLLNATAIAVAEGTDRVIEIVQRAYRAFLNIPRRIRQGLERALL

SEQ ID NO: 554 - protein, 856 aa, Artificial
  HIV Env
MRAKGIRKNCQRLWRWGTMLLGMLMICSAADKLWVTVYYGVPVWKEATTTLFCASDAKAYDTEVHNVWATHACVPTDPNPQEVVLENVTENFNMWKNNMVEQMHEDIISLWDQSLKPCVKLTPLCVTLICTNVNNTRTNSSDWDRREGEKMKGEIKNCSFNVTTSIRNKVRKEYALFYKLDVVPIDKANTSYTLIHCNTSVITQACPKVSFEPIPIHYCTPAGFAILKCNDKKFNGKGPCTNVSTVQCTHGIRPVVSTQLLLNGSLAEKEVVIRSENFTNNAKTIIVQLKEPVEINCTRLNNNTRKSIAIGPGRTVYATDRIIGDIRQAHCNLSSTKWNNTLKQIVTKLKEQFGNKTIIFNQSSGGDPEIVMHSFNCGGEFFYCNTTQLFNTTWLFNGTWNDTEGLNNTERNITLPCRIKQIINRWQEVGKAMYAPPITGTISCSSNITGLLLTRDGGRGENETETFRPGGGDMRDNWRSELYKYKVVKIEPLGVAPTKAKRRVVQREKRAVGAIGALFLGFLGAAGSTMGAVALTLTVQTRQLLSGIVQQQNNLLRAIEAQQHLLQLTVWGIKQLQARVLAVERYLKDQQLLGIWGCSGKLICTTAVPWNASWSNKSLDKIWNNMTWMEWEREIDNYTNLIYTLIEESQNQQEKNEKDLLELDTWASLWNWFDITNWLWYIKIFIMIIGGLIGLRIVFTILSLVNRVRQGYSPLSFQTRFPVPRGPDRPEGIEEEGGGRDRDTSGRLVTGFLALIWDDLRSLCLFSYHRLRDLLLIVARIVELLGRRGWEALKYWWNLLQYWSQELRNSAVSLFDTIAIAVAEGTDRVIEVVQRACRAILHIPRRIRQGLERLLL

SEQ ID NO: 555 - protein, 849 aa, Artificial
  HIV Env
MKAKGTRKNYQHLWKWGIMLLGMLMICSATEKLWVTVYYGVPVWKEATTTLFCASDAKAYDTEKHNVWATHACVPTDPNPQEVVLGNVTENFNMWKNNMVEQMHEDIISLWDQSLKPCVKLTPLCVTLNCTDLRNDTNTNNSIMEGGEMKNCSFNITTSIRDKMQKEYALLYKLDIVSIGSDNTSYILTECNASVITQACPKISFEPIPIHFCAPAGFAILKCNNKTFDGKGPCTNVSTVQCTHGIRPVVSTQLLLNGSLAEEKVVIRSDNFTDNVKTIIVQLKEAVEINCTRPNNNTRKGIYMGPGRRFYTTGRIIGDIRQAHCNISKEKWNNTLHQIVIELRKQFRNKTIVFNQSSGGDPEIVMHSFNCGGEFFYCKTAQLFNSTWNSTGNGTIKSNTTEIITLPCRIKQIVNMWQEVGKAMYAPPITGQIRCASHITGLLLTRDGGRENNTNETETFRPGGGDMRDNWRSELYKYKVVKIEPLGVAPTKAKRRVVQREKRAVGMIGAMFLGFLGAAGSTMGAASLTLTVQARLLLSGIVQQQNNLLRAIEAQQHLLRLTVWGIKQLQARVLAVERYLKDQQLLGIWGCSGKLICTTTVPWNASWSSKSLDKIWNNTTWMEWEREIDNYTNTTYTLIEESQNQQEKNEQELLELDKWANLWNWFDITNWLWYIKIFIMIIGGLIGLRIIFAVISTVNRVRQGYSPLSLQTHLPTPRGPDRPEGIEEEGGEQDRDRSIRLVNGFLALFWDDLRSLCLFSYHRLRDLLLIVTRIVGLLGRRGWEALKYWWNLLQYWIQELKNSAISLLNTTAIAVAEGTDRVIEVVQRAYRAILHIPTRIRQGLERALQ

SEQ ID NO: 556 - protein, 861 aa, Artificial
  HIV Env
MKVKEIRKNYQNLWRWGTLFLGMLMICSAEEKLWVTVYYGVPVWKEATTTLFCASDAKAHGTEVHNVWATHACVPTDPNPQEIVLENVTEYFDMWKNNMVEQMQEDVISLWDQSLKPCVKLTPLCVTLDCTDYVGNATNTTSTNNTASGSWGAMRGEIKNCSFNITTNIRDKVHKEYALFYKLDVVPIEKKNTSFRLISCNTSTITQACPKVSFEPIPIHYCTPAGFAILKCNNKKFDGKGQCTNVSTIQCTHGIRPVVSTQLLLNGSLAEEEVVLRSDNFTDNAKTIIVHLNESVEINCTRPSNNSRKSIYIGPGRRFHVTRAVTGDIRQAHCNISKAKWEKTLKQIVEKLREKFGNKTIIFNQSSGGDPEIVTHSFNCGGEFFYCNSTQLFNSTWNTGNDTRESNDTNNTGNITLPCRIKQILNLWQEVGKAMYAPPISGQISCSSNITGLLLTRDGGNTNTTGNTTETFRPGGGNMRDNWRSELYKYKVVKVEPLGIAPTKAKRRVVQREKRAVGMLGAMFLGFLGAAGSTMGARSITLTVQARQLLSGIVQQQNNLLRAIEAQQHLLQLTVWGIKQLQARVLAVERYLQDQQLLGIWGCSGKLICTTAVPWNSSWSNKSLEQIWGNMTWMQWEKEINNYTGLIYTLIQESQNQQEKNEQELLELDKWGSLWSWFSITNWLWYIKIFIMIVGGLVGLRIVFAVLSLVNRVRQGYPPLSFQTHLPAPRGPDRPGGIEEEGGEGDRDRSSRLVHGFLALVWDDLRSLCLFSYHRLRDLLSIAARIVELLGRRGWEILKYWWNLLQYWSQVLKNSAVSLLNVTAIAVAEGTDRIIEVVQRVGRAILHIPVRIRQGLERALL

SEQ ID NO: 557 - protein, 865 aa, Artificial
  HIV Env
MRVKGIRKNYQHWWRWGIMLLGMWMICSAAEKLWVTVYYGVPVWKEATTTLFCASDAKAYDTEVHNVWATHACVPIDPNPQEVFLENVTENFNMWKNNMVEQMHEDIISLWDQSLKPCVKLTPLCVTLKCTDLNDTNTNNSSTSENNTNPTISGGEGMGEGEMKNCSFNVTTNIRDKVQKEYALFYKLDIIPIDNTSYALRHCNTSVITQACPKVSFEPIPIHYCAPAGFAILQCNDKKFNGTGPCSNVSTVQCTHGIRPVVSTQLLLNGSLAEEEIVLRSENFTNNAKTIIVQLNASVEINCTRLNNNTRKSIRIGPGSTFYATGAIIGDIRQAHCNISREKWNDTLKQLVIKLGEQFGNSNIIVFKQSSGGDPEIVMHSFICGGEFFYCNTTQLSNSTWQRSDGTWNRTGGLNETKENITLPCRIKQIINRWQEVGKAMYAPPISGLIRCSSNITGLLLTRDGGNENNGTNGTETFRPEGGNMKDNWRSKLYKYKVVRIEPLGIAPTRARRRVVQREKRAVTFGALFLGFLGAAGSTMGCTSMTLTVQARLLLSGIVQQQNNLLRAIEAQQHLLQLTVWGIKQLQARVLAVERYLRDQQLLGIWGCSGKLICTTNVPWNTSWSNKSENEIWDNMTWMEWDREINNYTNLIYDLLEKSQNQQEKNEQELLELDKWASLNWFNITKWLWYIKIFIMIVGGLVGLRIIFFVLSIVNRVRQGYSPLSFQTHFPSPRGPDRPGGIEGEGGEGDSGGSSHLVDGFLTLIWVDLRSLCLFSYHLLRDLLLIVTRSVELLGLRGWEILKYLWNLLQYWSQELKNSAVSLLNATAVAVAEGTDRIIEILQRAYRAILNIPRRIRQGLERALL

SEQ ID NO: 558 - protein, 856 aa, Artificial
  HIV Env
MKVKETRKNYQHLWRWGTMLLGMLMICSAAEQLWVTVYYGVPVWKEATTTLFCASDAKASDTEVHNVWATHACVPTDPNPQEVALENVTEDFDMWKNNMVEQMHEDIINLWDQSLKPCVKLTPLCVTLNCTDFGNATNTTSSSGVIIEKGEIKNCSFKINTNMKDKAQIEYALFYKLDVVPIDNNNTNTSYTSYRLISCNTSVITQACPKVSFEPIPIHFCTPAGFALLKCNDKKFNGTGPCKNVSTVQCTHGIRPVVSTQLLLNGSLAEEEVVIRSANFSNNAKTIIVQLNESVAINCTRPNNNTRKGIHIGPGKAFYATGQIIGDIRQAHCNLSRAKWNNTLKQIVSKLRKQFGNKTIVFSQPLGGDPEIVMHSFNCGGEFFYCNSTQLFNSTWNDTGNVTERSNNNENITLPCRIKQIINMWQGVGKAMYAPPISGQIRCSSNITGLLLTRDGGKDENKTGTEIFRPGGGDMKDNWRSELYKYKVVKIEPLGVAPTRAKRRVVQREKRAVGIGALFLGFLGAAGSTMGAASITLTVQARQLLSGIVQQQNNLLRAIEAQQHLLQLTVWGIKQLQARVLAVERYLKDQQLLGIWGCSGKLICTTAVPWNASWSNKSLDKIWNNMTWMEWDREVSNYTSLIYTLIEESQNQQEKNEQELLELDKWASLWNWFDITKWLWYIKIFIMIVGGLVGLRIIFAVLSIVNRVRQGYSPLSFQTRLPAPRGPDRPEGIEEEGGERDRDRSGRLVNGFLALIWDDLRSLCLFSYHRLRDLLLIVTRIVELLGRRGWEVLKYWWNLLQYWSQELKNSAVSLLNATAIAVAEGTDRVIEVVQRACRAVLHIPVRIRQGLERALL

SEQ ID NO: 559 - protein, 846 aa, Artificial
  HIV Env
MRVRGTRMNCQHLWRWGTMLLGMLMISSAAENLWVTVYYGVPVWKEATTTLFCASDAKTYDTEVHNVWATHACVPTDPNPQEVTLGNVTENFNMWKNNMADQMQEDIISLWDESLKPCVELTPLCVTLKCNDTTMSKNDSNTLTMEKGEIKNCSFNVTTSLRNKVQKEYASFYRLDLVQTDENSTSYRLISCNASVIKQACPKVSFEPIPIHYCTPAGFAIIKCNNKTFNGTGTCTNVSTVQCTHGIRPVVSTQLLLNGSIAEEEILIKSENITNNAKTIIIQLNKSVKINCTRPNNISKRRSMHIGTGRVFYTQTIGNIRQAHCNLSKAEWNNTLPQIVKKFREQFGNKTIVFNQSSGGDLEIVMHSFNCGGEFFYCNATPLFNSTWNATSTLNATNEENENITLLCRIKQIINMWQRVGKAMYAPPIEGLIKCSSNITGLMLTRDGGTNDSEVEVFRPGGGDMKDIWRNELYKYKVVKVEPLGLAPTRARRRVVQREKRAVGIGALFLGFLGAAGSTMGAASLTLTVQARQLLSGIVQQQNNLLRAIEAQQHMLQLTVWGIKQLQARVLAVERYLRDQQLLGIWGCSGKLICNTNVPWNISWSNKTYDEIWNNMTWMQWEREIDNYTDHIYNLLEKSQNQQEKNEQDLLELDKWASLWNWFDITNWLWYIRIFIMIVGGLIGLRIVFAVLSIVNRVRQGYSPLSFQTHLPTPRGPDRPEGIDEEGGERDRDRSERSVDGFLAIIWVDLRSLCLFSYHRLRDLLLIVTRIVELLGRRGWEALKYLWNLLQYWIQELKNSAVSLFNAIAIAVAEGTDRVIEVVQRVFRAILHIPTRIRQGLERALL

SEQ ID NO: 560 - protein, 859 aa, Artificial
  HIV Env
MRVKEIRKNYQHLWRWGTMLFGILMIYSAAGNLWVTVYYGVPVWKEATTTLFCASDAKAYDTEVHNVWATHACIPTDPNPQEIVLENVTEDFNMWKNNMVEQMQEDIISLWDQSLKPCVKLTPLCVTLNCTDELKNATNTTSTNTPSGSWKKMERGEIKNCSFNVLGDKKQKAYALFYKLDVVPIDNDKNSTKYRLISCNTSVTTQACPKISFEPIPIHYCAPAGFAILKCKDKKFNGTGSCKNVSTVQCTHGIKPVVSTQLLLNGSLAEEEVVIRSANFSDNAKTIIVQLKEAVEINCTRPNKKTRKRITTGPGRVYYTTGEIVGDIRQAHCNLSRAKWNDTLRQIVIKLREQFENKTIVFNQSSGGDPEIVMHSFNCGGEFFYCKSTQLFNSTWAGNNTWNSSAERSDDTGGNITLPCRIKQIINMWQEVGKAMYAPPISGQIRCTSNITGLLLTRDGGTSDTNTTETFRPGGGDMRDNWRSELYKYKVVKIEPLGVAPTTAKRRVVQREKRAVGIGALFLGFLGAAGSTMGAASMTLTVQARQLLSGIVQQQNNLLRAIEAQQHLLQLTVWGIKQLQARVLAVERYLKDQQLLGIWGCSGKLICTTAVPWNASWSNKSLNQIWDNMTWMQWEREIENYTDLIYNLIEESQNQQEKNEQELLELDKWASLWNWFTITNWLWYIKIFIMIVGGLIGLRIVFTVLSIVNRVRQGYSPLSFQTHLPTPRGPDRPEGIEEEGGERDRDRSGRLVNGFLALFWDDLRSLCLFSYHRLRDLILVVTRIVELLGRRGWEALKYWWSLLQYWSQELKNSAVNLLNVTAIAVAEGTDRVIEVVQRTYRAILHIPRRIRQGLERLLL

SEQ ID NO: 561 - protein, 849 aa, Artificial
  HIV Env
MRVMGIRKNYQHLWKGGTLLLGILMICSAAEQLWVTVYYGVPVWKEANTTLFCASDAKAYDTEVHNVWATHACVPTDPNPQEILLENVTEDFNMWKNNMVEQMHEDIISLWDQSLKPCVKLTPLCVTLHCTDLKNGTNLKNGTKIIGKSMRGEIKNCSFNVTKNIIDKVKKEYALFYRHDVVPIDRNITSYRLISCNTSTLTQACPKVSFEPIPIHYCAPAGFAILKCKDKKFNGTGPCTNVSTVQCTHGIRPVVSTQLLLNGSLAEEEVVIRSSNFTDNAKIIIVQLNETVEINCTRPNNNTRKGITLGPGRVFYTTGEIVGDIRKAHCNISKVKWHNTLKRVVEKLREKFENKTIVFNKSSGGDPEIVMHSFNCGGEFFYCNTKKLFNSTWNGTEGSYNIEGNDTITLPCRIKQIINMWQEVGKAMYAPPISGQIWCSSNITGLLLTRDGGKNSSTEIFRPGGGDMRDNWRSELYKYKVVRVEPLGIAPTKAKRRVVQREKRAVGIGAVFLGFLGAAGSTMGAASITLTVQARQLLSGIVQQQNNLLRAIEAQQHMLQLTVWGIKQLQARVLAVERYLQDQQLLGIWGCSGKLICTTTVPWNTSWSNKSLDTIWGNMTWMQWEKEINNYTGLIYNLIEESQNQQEKNEQELLALDKWASLWNWFNISNWLWYIKIFIMIVGGLIGLRIVFSVLSIVNRVRQGYSPLSFQTRFPASRGPDRPEGIEEEGGDRDRDRSSPLVDGFLAIIWVDLRTLFLFSYHRLRDLLLIVTRIVELLGRRGWELLKYLWNLLQYWSQELKNSAVSLLNATAIAVGEGTDRIIEILQRAGRAILNIPTRIRQGLERALL

SEQ ID NO: 562 - protein, 848 aa, Artificial
  HIV Env
MRVKGIRKNYQHLWKGGILLLGTLMICSAVEKLWVTVYYGVPVWKETTTTLFCASDAKAYDTEVHNVWATHACVPTDPNPQEVVLENVTEDFNMWKNNMVEQMQEDVINLWDQSLKPCVKLTPLCVTLNCKDVNATNTTSSSEGMMERGEIKNCSFNITKSIRDKVQKEYALFYKLDVVPIDNKNNTKYRLISCNTSVITQACPKVSFEPIPIHYCAPAGFAILKCNNKTFNGKGQCKNVSTVQCTHGIRPVVSTQLLLNGSLAEEKVVIRSDNFTDNAKTIIVQLNESVKINCTRPSNNTRKSIHIGPGRAFYTTGEIIGDIRQAHCNISRAQWNNTLKQIVEKLREQFNNKTIVFTHSSGGDPEIVMHSFNCGGEFFYCNSTQLFNSTWNDTEKSSGTEGNDTIILPCRIKQIINMWQEVGKAMYAPPIKGQIRCSSNITGLLLTRDGGKNESEIEIFRPGGGDMRDNWRSELYKYKVVKIEPLGVAPTKAKRRVVQREKRAVGIGALFLGFLGAAGSTMGARSMTLTVQARQLLSGIVQQQNNLLRAIEAQQHMLQLTVWGIKQLQARVLAVERYLKDQQLMGIWGCSGKLICTTAVPWNTSWSNKSLDSIWNNMTWMEWEKEIENYTNTIYTLIEESQIQQEKNEQELLELDKWASLWNWFGITKWLWYIKIFIMIVGGLIGLRIVFSVLSIVNRVRQGYSPLSFQTLLPATRGPDRPEGIEEEGGERDRDRSGQLVNGFLALIWVDLRSLFLFSYHRLRDLLLTVTRIVELLGRRGWEILKYWWNLLQYWSQELKNSAVSLLNATAIAVAEGTDRIIEVVQRVYRAILHIPTRIRQGLERALL

SEQ ID NO: 563 - protein, 856 aa, Artificial
  HIV Env
MRVKGIRRNYQHWWGWGTMLLGLLMICSATEKLWVTVYYGVPVWKEATTTLFCASDAKAYDTEVHNVWATQACVPTDPNPQEVELVNVTENFNMWKNNMVEQMHEDIISLWDQSLKPCVKLTPLCVTLNCTDLRNTTNTNNSTANNNSNSEGTIKGGEMKNCSFNITTSIRDKMQKEYALLYKLDIVSIDNDSTSYRLISCNTSVITQACPKISFEPIPIHYCAPAGFAILKCNDKKFSGKGSCKNVSTVQCTHGIRPVVSTQLLLNGSLAEEEVVIRSENFTDNAKTIIVHLNESVQINCTRPNYNKRKRIHIGPGRAFYTTKNIIGTIRQAHCNISRAKWNDTLRQIVSKLKEQFKNKTIVFNQSSGGDPEIVMHSFNCGGEFFYCNTSPLFNSTWNGNNTWNNTTGSNNNITLQCKIKQIINMWQEVGKAMYAPPIEGQIRCSSNITGLLLTRDGGKDTDTNDTEIFRPGGGDMRDNWRSELYKYKVVTIEPLGVAPTKAKRRVVQREKRAAIGALFLGFLGAAGSTMGAASVTLTVQARLLLSGIVQQQNNLLRAIEAQQHMLQLTVWGIKQLQARVLAVERYLKDQQLLGFWGCSGKLICTTTVPWNASWSNKSLDDIWNNMTWMQWEREIDNYTSLIYSLLEKSQTQQEKNEQELLELDKWASLWNWFDITNWLWYIKIFIMIVGGLVGLRIVFAVLSIVNRVRQGYSPLSLQTRPPVPRGPDRPEGIEEEGGERDRDTSGRLVHGFLAIIWVDLRSLFLFSYHHRDLLLIAARIVELLGRRGWEVLKYWWNLLQYWSQELKSSAVSLLNATAIAVAEGTDRVIEVLQRAGRAILHIPTRIRQGLERALL

SEQ ID NO: 564 - protein, 853 aa, Artificial
  HIV Env
MRVKEIRKNWQHLRGGILLLGMLMICSAAKEKTWVTIYYGVPVWREATTTLFCASDAKAYDTEVHNVWATHACVPTDPNPQEVVLGNVTENFNMWKNNMVDQMHEDIISLWDESLKPCVKLTPLCVTLNCTNLNITKNTTNPTSSSWGMMEKGEIKNCSFYITTSIRNKVKKEYALFNRLDVVPIENTNNTKYRLISCNTSVITQACPKVSFQPIPIHYCVPAGFAMLKCNNKTFNGSGPCTNVSTVQCTHGIRPVVSTQLLLNGSLAEEDIVIRSENFTDNAKTIIVQLNESVVINCTRPNNNTRRRLSIGPGRAFYARRNIIGDIRQAHCNISRAKWNNTLQQIVIKLREKFRNKTIAFNQSSGGDPEIVMHSFNCGGEFFYCNTAQLFNSTWNVTGGTNGTEGNDIITLQCRIKQIINMWQKVGKAMYAPPITGQIRCSSNITGLLLTRDGGNSTETETEIFRPGGGDMRDNWRSELYKYKVVRIEPIGVAPTRAKRRTVQREKRAVGIGAVFLGFLGAAGSTMGAASVTLTVQARLLLSGIVQQQNNLLRAIEAQQHMLQLTVWGIKQLQARVLALERYLRDQQLMGIWGCSGKLICTTSVPWNVSWSNKSVDDIWNNMTWMEWEREIDNYTDYIYDLLEKSQTQQEKNEKELLELDKWASLWNWFDITNWLWYIRLFIMIVGGLIGLRIVFAVLSIVNRVRQGYSPLSFQTLLPASRGPDRPEGTEEEGGERDRDRSGPLVNGFLALFWVDLRNLCLFLYHLLRNLLLIVTRIVELLGRRGWEALKYWWNLLQYWSQELKNSAVSLLNATAIAVAEGTDRVIKIVQRACRAIRNIPTRIRQGLERALL

SEQ ID NO: 565 - protein, 865 aa, Artificial
  HIV Env
MRVMEMRKNCQHLWKWGTMLLGMLMICSAAEDLWVTVYYGVPVWKEATTTLFCASEAKAYKTEVHNVWAKHACVPTDPNPQEVLLENVTENFNMWKNNMVEQMHEDIISLWDQSLKPCVKLTPLCVTLNCTDANLNGTNVTSSSGGTMMENGEIKNCSFQVTTSRRDKTQKKYALFYKLDVVPIEKGNISPKNNTSNNTSYGNYTLIHCNSSVITQACPKVSFEPIPIHYCTPAGFAILKCNDKKFNGTGPCKNVSTVQCTHGIRPVVSTQLLLNGSLAEEEVVIRSENFTDNVKTIIVQLNASVQINCTRPNNNTRKSITKGPGRVIYATGQIIGDIRKAHCNLSRAQWNNTLKQVVTKLREQFDNKTIVFTSSSGGDPEIVLHSFNCGGEFFYCNTTQLFNSTWNSTEGSNNTGGNDTITLPCRIKQIVNMWQEVGKAMYAPPISGQIKCISNITGLLLTRDGGEDTTNTTEIFRLGGGNMRDNWRSELYKYKVVRIEPLGVAPTRAKRRVVQREKRAVGTIGAMFLGFLGAAGSTMGAGSITLTVQARHLLSGIVQQQNNLLRAIEAQQHLLQLTVWGIKQLQARVLAVERYLRDQQLLGIWGCSGKLICTTTVPWNASWSNKSLNMIWNNMTWMQWEREIDNYTGIIYNLLEESQNQQEKNEQELLELDKWANLWNWFDITQWLWYIRIFIMIVGGLVGLKIVFAVLSIVNRVRQGYSPLSFQTHLPAPRGPDRPEGIEGEGGERDRDRSGGAVNGFLTLIWDDLWTLCSFSYHRLRDLLLIVVRIVELLGRRGWEALKYWWNLLQYWSQELKNSAVSLLNTTAIAVAEGTDRIIEVAQRILRAFLHIPRRIRQGLERALL

SEQ ID NO: 566 - protein, 855 aa, Artificial
  HIV Env
MKVKGTRRNYQHLWRWGTLLLGMLMICSATEKLWVTVYYGVPVWKEATTTLFCASDARAYDTEVHNVWATHACVPTDPNPQEVVLGNVTENFNMWKNNMVEQMQEDIISLWDQSLKPCVKLTPLCVTLNCTDLGKATNTNSSNWKEEIKGEIKNCSFNITTSIRDKIQKENALFRNLDVVPIDNASTTTNYTNYRLIHCNRSVITQACPKVSFEPIPIHYCTPAGFAILKCNNKTFNGKGPCTNVSTVQCTHGIRPIVSTQLLLNGSLAEEEVVIRSDNFTNNAKTIIVQLNESVAINCTRPNNNTRKSIYIGPGRAFHTTGRIIGDIRKAHCNISRAQWNNTLEQIVKKLREQFGNNKTIVFNQSSGGDPEIVMHSFNCRGEFFYCNTTQLFNNTWRLNHTEGTKGNDTIILPCRIKQIINMWQEVGKAMYAPPIGGQISCSSNITGLLLTRDGGTNVTNDTEVFRPGGGDMRDNWRSELYKYKVIKIEPLGIAPTKAKRRVVQREKRAVGIVGAMFLGFLGAAGSTMGAVSLTLTVQARQLLSGIVQQQNNLLRAIEAQQHLLQLTVWGIKQLQARVLAVERYLRDQQLLGIWGCSGKLICTTAVPWNASWSNKSLEDIWDNMTWMQWEREIDNYTNTIYTLLEESQNQQEKNEQELLELDKWASLWNWFSITNWLWYIKIFIMIVGGLVGLRIVFAVLSIVNRVRQGYSPLSFQTRLPVPRGPDRPDGIEEEGGERDRDRSVRLVDGFLALIWEDLRSLCLFSYRRLRDLLLIAARTVEILGHRGWEALKYWWSLLQYWIQELKNSAVSWLNATAIAVTEGTDRVIEVAQRAYRAILHIHRRIRQGLERLLL

SEQ ID NO: 567 - protein, 791 aa, Artificial
  HIV Env
MRVKGIRKNYQHLWKWGIMLLGILMICSAAENLWVTVYYGVPVWKEATTTLFCASDAKAYDTEVHNVWATHACVPTDPNPQEVVLENVTENFNMWKNNMVEQMHEDIISLWDQSLKPCVKLTPLCVTLNCTNVNVTNLKNETNTNSSSGGEKMEEGEMKNCSFNVTTLIRNKRKTEYALFYKLDVMPIDHDNTSYTLINCKSSTITQACPKVSFEPIPIHYCAPAGFAILKCNDKKFNGKGPCKNVSTVQCTHGIRPVVSTQLLLNGSLAEEDIVIRSENFTDNAKNIIVQLNVSIEINCTRPNNNTRKKITLGPGRVLYTTGEIIGDIRRAHCNLSRTSWNNTLKQIVEKLREIKQFKNKTIVFKQSSGGDPEIVMHSFNCGGEFFYCNSTQLFNSTWHANGTWKNTEGADNNITLPCRIKQIINRWQEVGKAMYAPPIEGQIRCLSNITGLLLTRDGGSSEENQTEIFRPGGGNMKDNWRSELYKYKVVKIEPLGVAPTKAKRRVVQREKRAVGMLGAMFLGFLGAAGSTMGAASMTLTVQARLLLSGIVQQQNNLLRAIEAQQHLFELTVWGIKQLQARVLAVERYLKDQQLLGIWGCSGKLICTTTVPWNASWSNRSQDYIWNNMTWMEWEREINNYTGLIYNLIEESQNQQEKNEQELLELDKWASLWTWFDISNWLWYIKIFIMIVGGLIGLRIVFTVLSIVNRVRQGYSPLSFQTHLPAPRGPDRPEGIEEEGGERDRDRSGRLVDGFLTLIWVDLRSLCLFLYHRLIDLLLIAKRIVELLGRR

SEQ ID NO: 568 - protein, 857 aa, Artificial
  HIV Env
  misc_feature (100)..(100): Xaa can be any naturally occurring amino acid
  misc_feature (109)..(109): Xaa can be any naturally occurring amino acid
  misc_feature (482)..(482): Xaa can be any naturally occurring amino acid
  misc_feature (490)..(490): Xaa can be any naturally occurring amino acid
  misc_feature (501)..(501): Xaa can be any naturally occurring amino acid
  misc_feature (506)..(507): Xaa can be any naturally occurring amino acid
  misc_feature (512)..(512): Xaa can be any naturally occurring amino acid
  misc_feature (687)..(687): Xaa can be any naturally occurring amino acid
  misc_feature (706)..(706): Xaa can be any naturally occurring amino acid
  misc_feature (713)..(713): Xaa can be any naturally occurring amino acid
MRVKGIRKNCQHLWRWGIMLLGMLMICNATEQLWVTVYYGVPVWKEATTTLFCASDAKAYDTEVHNVWATHACVPTDPNPQEVRLENVTEDFNMWKNNMXEQMHEDIIXLWDQSLKPCVKLTPLCVTLNCTDVWNATSTSKNTTITNSSNERPMEKGEMKNCSFSITTSIRDKVQKEHALFYRLDVVPIDKNNTNTSYRLIHCNTSTITQACPKVSFEPIPIHYCTPAGFAILKCNDKKFNGTGQCKNVSTVQCTHGIRPVVSTQLLLNGSLAEEEVVIRSANFTNNAKTIIVQLKESVEINCTRPGNKIRRRIHIGPGRAFYTDRVGDIRQAYCNISGTKWKNTLEKIVAKIREIKQFKNKTIVFNHSSGGDPEIVMHSFNCGGEFFYCNSTQLFNSTWNSTEGNSTWSDKIIRLPCRIKQIINMWQEVGKAMYAPPIDGQIRCSSNITGLLLTRDGGNSNETTEIFRPGGGDMRDNWRSXLYKYKVVXIEPLGVAPTKXKRRVXXREKRXVGVIGVMFLGFLGAAGSTMGAASITLTVQARQLLSGIVQQQNNLLRAIEAQQHMLQLTAWGIKQLQARVLAVERYLRDQQLLGIWGCSGKLICTTAVPWNATWSNKSLDKIWQNMTWMEWEREIDNYTELIYSLLEQSQNQQEKNEQELLELDKWASLWNWFNITQWLWYIKIFXMIVGGLIGLRIVFAVLSIXNRVRQGXSPLSFQTLLPVPRGPDRPEGIEEEGGERDRDRSNRLVHGLLALIWDDLRSLCLFSYHRLRDLLSIVARIVELLGRRGWEILKYWGNLLQYWGQELRNSAISLLNATAIAVAEGTDRVIEVGQRIFRAILHIPRRIRQGLERVLL

SEQ ID NO: 569 - protein, 843 aa, Artificial
  HIV Env
MRATEIRKNYQHLWKGGTLLLGMLMICSAAEQLWVTVYYGVPVWKEATTTLFCASDAKAYDTEVHNVWATHACVPTDPNPQEVKLENVTENFNMWKNNMVEQMHEDIISLWDQSLKPCVKLTPLCVTLNCTDLRNATNTTSSSWETMEKGEIKNCSFNITTSIRDKVQKEYALFYNLDVVPIDNASYRLISCNTSVITQACPKVSFEPIPIHYCAPAGFAILKCNDKKFNGTGPCTNVSTVQCTHGIRPVVSTQLLLNGSLAEEEIVIRSENFTNNAKTIIVQLNESVVINCTRPNNNTRKSINIGPGRALYTTGEIIGDIRQAHCNLSKTQWENTLEQIAIKLKEQFGNNKTIIFNPSSGGDPEIVTHSFNCGGEFFYCNSTQLFTWNDTRKLNNTGRNITLPCRIKQIINMWQEVGKAMYAPPIRGQIRCSSNITGLLLTRDGGKDTNGTEIFRPGGGDMRDNWRSELYKYKVVKIEPLGVAPTKAKRRVVQREKRAVGLGALFLGFLGAAGSTMGAASITLTVQARQLLSGIVQQQNNLLRAIEAQQHLLQLTVWGIKQLQARVLAVERYLRDQQLLGIWGCSGKLICTTTVPWNTSWSNKSLNEIWDNMTWMKWEREIDNYTHIIYSLIEQSQNQQEKNEQELLALDKWASLWNWFDITKWLWYIKIFIMIVGGLIGLRIVFVVLSIVNRVRQGYSPLSFQTHLPAQRGPDRPDGIEEEGGERDRDRSGPLVDGFLAIIWVDLRSLCLFSYHRLRDLLLIVTRIVELLGRRGWGVLKYWWNLLQYWIQELKNSAVSLLNATAIAVAEGTDRVIEILQRAFRAVLHIPVRIRQGLERALL

SEQ ID NO: 570 - protein, 842 aa, Artificial
  HIV Env
MRVRGMQRNWQHLGKWGLLFLGILIICNAENLWVTVYYGVPVWKEATTTLFCASDAKAYEKEAHNVWATHACVPTDPNPQEVVLENVTENFDMWKNNMVEQMHTDIISLWDQSLKPCVKLTPLCVTLRCSNATTNSTQNDTLKEEPGAIQNCSFNMTTEVRDKQLKVHALFYRLDIVPISNDNSSNDNSSREYRLINCNTSTLTQACPKVSWDPIPIHYCAPAGYAILKCNDKKFNGTGPCRNVSTVQCTHGIKPVVSTQLLLNGSLAEKDIIIRSQNISDNAKTIIVQLNVSVPINCTRPNNNTRKSIPIGPGRAFYTTGEIIGDIRKAHCNVSGTKWNETLEKVRAKLKPHFPNATIKFNSSSGGDLEITMHSFNCRGEFFYCNTSGLFNDTVDNGTITLPCRIKQIVNMWQEVGRAMYAAPIAGNITCSSNITGLLLTRDGGQNNQTEETFRPGGGNMKDNWRSELYKYKVVEIEPLGVAPTKAKRQVVKREKRAVGMGALFLGFLGAAGSTMGAASITLTAQARQLLSGIVQQQNNLLRAIEAQQHLLQLTVWGIKQLQARILAVERYLKDQQLLGLWGCSGKLICTTDVPWNSSWSNKSQEKIWGNMTWMEWEKEISNYSNEIYRLIEESQNQQEKNEQELLALDKWASLWNWFDISKWLWYIKIFIMIVGGLIGLRIVFAVLSIVNRVRKGYSPLSLQTRFPSPREPDRPEGIEEGGGEPGKDRSVRLVNGFLALVWDDLRNLCLFSYRHLRDFILIAARIVDRGLKRGWEALKLLGNLALYWSQELKNSAISLLNTTAIVVAEGTDRVIEALQRAGRAVLNVPRRIRQGLERALL

SEQ ID NO: 571 - protein, 856 aa, Artificial
  HIV Env
MRVEGIQRNWKQWWIWGILGFWMVMIYNVRGNLWVTVYYGVPVWKEAKTTLFCASDAKAYDAEVHNVWATHACVPTDPNPQEMVLENVTENFNMWENDMVEQMHQDIISLWDQSLKPCVKLTPLCVTLHCSNRTIDYNNRTDNMGGEIKNCSFNMTTEVRDKREKVHALFYRLDIVPLKNESSNTSGDYRLINCNTSAITQACPKVSFDPIPIHYCAPAGYAILKCNNKTFNGTGPCNNVSTIQCTHGTKPVVSTQLLLNGSLAEEEIIIRSKNLTDNVKTIIVHLNESVEINCTRPNNNTRKSIRIGPGQAFYATGEIIGDIRQAHCNISRTAWNKTLQEVGKKLAEHFPNKAIKFAKHSGGDLEITTHSFNCRGEFFYCNTSSLFNSTYTPNSTENITGTENSIITIPCRIKQIINMWQGVGRAMYAPPIEGILTCRSNITGLLLTRDGGTGMHDTEIFRPEGGDMRDNWRSELYKYKVVEIKPLGIAPTKAKRRVVEREKRAVGIGAVFLGFLGAAGSTMGAASITLTVQVRQLLSGIVQQQSNLLRAIEAQQHMLQLTVWGIKQLQTRVLAIERYLRDQQLLGIWGCSGKLICTTAVPWNSSWSNRSQEDIWNNMTWMQWDREISNYTNTIYRLLEDSQNQQEKNEQDLLALDKWQNLWTWFGITNWLWYIKIFIKIVGGLIGLRIIFAVLSIVNRVRQGYSPLSFQTLTPNPRGPDRLGGIEEEGGEQDRDRSIRLVSGFLALAWDDLRSLCLFSYHRLRDLILIAARAVELLGRSSLRGIQRGWEILKYLGGLVQYWSLELKKSAISLFDTIAIAVAEGTDRIIEVIQGIWRAICNIPRRIRQGFEAALQ

SEQ ID NO: 572 - protein, 859 aa, Artificial
  HIV Env
MRVMGIQRNCQQWWIWGILGFWMIINGMGSWVTVYYGVPVWKEAKATLFCASDARAYDREVHNVWATHACVPTDPNPQEVNLENVTENFNMWKNDMVDQMHEDIISLWDQSLKPCVKLTPLCVTLNCTEVNGTSDSSVPANGTSNSSVSMKEEMRNCSFNITTELRDKNKQERARFYRLDIVQLNNNSNSNEYRLINCNTSTITQACPKVTFDPIPIHYCAPAGYAILKCNNKTFNGSGPCNNVSTVQCTHGIKPVVSTQLLLSGSLAEEEIVIRSENLTNNAKIIIVHLNKTVRIVCTRPGNNTRRSMRIGPGQTFYATGEIIGDIRAHCNISERDWNDTLNRVSKKLAEHFPNKTIEFKPSSGGDLEITTHSFNCRGEFFYCNTSRLFNESYSFNESHWSNDTNATITLPCRIKQIINMWQGVGRAIYAPPIAGNITCISNITGLLLTRDGGTTRNNESEIFGPGGGDMRDNWRSELYKYKVVEIKPLGIAPTEARRRVVEREKRAVGIGAVFLGFLGAAGSTMGAASITLTVQARQLLSGIVQQQSNLLRAIEAQQHMLQLTVWGIKQLQTRVLAIERYLKDQQLLGIWGCSGKLICTTNVPWNNSWSNKSLDYIWGNMTWMEWDREISNYSNTIYRLLEDSQNQQEKNEKDLLALDSWNNLWNWFGITKWLWYIKIFIMIVGGLIGLRIIFAALSIVNRVRQGYSPLSFQTLTPNPRGPDRLGGIEEEGGEQDRDRSIRLVSGFLALVWDDLRSLCLFSYHRLRDFILIAARAAELLGRSSLRGLQKGWETLKFLGSLVQYWGLELKKSAISLLDTTAIAVAEGTDRIIEIAQRICRAICNIPTRIRQGFEAALQ

SEQ ID NO: 573 - protein, 849 aa, Artificial
  HIV Env
MRVMGIMRNCQPWWIWGILGFWMLMICNVMGKSWVTVYYGVPVWREAKATLFCASDAKAYEREVHNVWATHACVPTDPNPQEVVLENVTENFNMWENDMVNQMHEDIISLWDQSLKPCVKLTPLCVTLNCTNVTVNDTLHQNFTDMKNCSFNVTTELRDKRKHEYALFYRLDIVPLNNKNESNSEYRLINCNTSTITQSCPKVSFDPIPIHYCAPAGYAILKCNNKTFNGTGPCNNVSTVQCIHGIKPVVSTPLLLNGSLAEKEIIIRFKIITNNAKTIIVHLNESVEIVCIRPNNNTRKSVRIGPGQTFYATEAIIGNISEAHCNISESQWNNTLQRVSEKLKEHFPNKTIKFNQPAGGDLEITTHSFNCGGEFFYCNTSKLFNGTYIQPNSTEDTPNSTITLPCRIKQFINLWQEVGRAMYAPPIAGNIICKSNITGLLLTRDGDKNDSETFRPAGGDMRDNWRSELYKYKVVEIKPLGLAPTKAKRRVVEREKRAVGIGAVFLGFLGAAGSTMGAASITLTVQARRLLSGIVQQQSNLLRAIEAQQHMLQLTVWGIKQLQTRVLAIERYLKDQQLLGIWGCSGKLICTTAVPWNASWSNKSQEEIWGNMTWMQWDREISNYTDTIYRLLEVSQNQQEKNEKDLLALDSWKNLWNWFDISKWLWYIKIFIMIVGGLIGLRIIFAVISMVNRVRQGYSPLSFQTLTPNPRGPDRLERIEEEGGEQDRNRSIRLVSGFLALAWDDLRSLCLFCYHRLRDFTLVAARAVELLGRSSLKGLQRGWEILKYLGSLVQYWGLELKMSTISLLDTTAIAIAEGTDRIIELIQRIGRAIRNTPRRIRQGFETALL

SEQ ID NO: 574 - protein, 850 aa, Artificial
  HIV Env
MRVRGILRNYLQWWIWGILGFWMLMVCSKENMWVTVYGVPVWKEAKTTLFCASDAKAYEGEVHNVWATHACVPTDPNPQELVLGNVTENFNMWKNDMVDQMHEDIISLWDESLKPCVKLTPLCVTLNCSNNVTRNSNATYNNKNNGEIKNCSFNATTEIRDKQQKVYALFYRLDIVPLDNNSSEYRLINCNTSTITQACPKVSFDPIPIHYCAPAGYAILKCNNKTFNGTGPCTNVSTVQCTHGIKPVVSTQLLLNGSLAEEEIIIRSENITDNVKTIIVHLNKSVEIVCTRPNNNTRKSIRIGPGQTFYATGDIIGDIRQAHCNISKGAWNETLQWVGKKLKEHFPNKTIRFKESSGGDLEITTHSFNCGGEFFYCNTSQLFNSTYNSTYMPSNNTGTNITLQCRIKQIINRWQEVGRAMFAPPIAGNITCKSNITGILLVRDGGNTSENIETFRPGGGNMKDNWRSELYKYKVVEVKPLGIAPTRAKRRVVEREKRAVGIGAVFLGFLGAAGSTMGAASITLTVQARQLLSGIVQQQSNLLRAIEAQQHMLQLTVWGIKQLQARVLALERYLRDQQLLGIWGCSGKLICTTNVPWNSSWSNKTENEIWENMTWMQWEREIDNYTDTIYRLLEVSQNQQEQNEKDLLALDSWANLWNWFNISNWLWYIKIFIMIVGGLIGLRIIFAVLSIVNRVRQGYSPLSFQTLIPSPREPDKLERIEEEGGEQDRDRSIRLVSGFLALAWDDLRSLCLFSYHRLRDSILVAARTVELLGRSSLRGLQRGWEALKYLGSLVQYWGLELKKSAISLLDTIAIAVAEGTDRIIELTQRVFRAIRNIPRRIRQGFEAALQ

SEQ ID NO: 575 - protein, 855 aa, Artificial
  HIV Env
MRVRGILRSWQQWWIWGTLGFWICSGLGNLWVTVYDGVPVWREASNTLFCASYAKAYEKEVHNVWATHACVPTDPNPQEIELDNVTENFNMWKNDMVDQMHEDIISLWDQSLKPCVKLTPLCVTLKCTNYSTNYSNTMNATSYNNNTTEEIKNCTFNMTTELRDKKQQVYALFYKLDIVPLNSNSSEYRLINCNTSAITQACPKVSFDPIPIHYCAPAGYAILKCKNNTFNGTGPCQNVSTVQCTHGIKPVVSTQLLLNGSLAEGGEIIIRSKNLSNNAYTIIVHLNDSVEIVCTRPNNNTRKGIRIGPGQTFYATENIIGDIRQAHCNISAGEWNKAVQRVSAKLREHFPNKTIEFQPSSGGDLEITTHSFNCRGEFFYCNSSKLLNSSYNGTSYRGTESNSSIITLPCRIKQIINMWQKVGRAIYAPPIEGNITCSSSITGLLLARDGGLDNVTTEIFRPQGGDMKDNWRNELYKYKVVEIKPLGVAPTEAKRRVVEREKRAVGIGAVIFGFLGAAGSTMGAASITLTAQARQLLSGIVQQQSNLLRAIEAQQHMLQLTVWGIKQLQARVLAIERYLKDQQLLGIWGCSGKLICTTTVPWNSSWSNKTQGEIWENMTWMQWDKEISNYTGIIYRLLGESQNQQEQNEKDLLALDSWNNLWSWFNISNWLWYIKIFIMIVGGLIGLRIIFAVLSIVNRVRQGYSPLSFQTLTPNPRGLDRLGRIEEEGGEQDRDRSIRLVQGFLALAWDDLRSLCLFSYHRLRDLILVTARVVELLGRSSLRGLQRGWEALKYLGSLVQYWGLELKKSATSLLDSIAIAVAEGTDRIIEVIQRIYRAFCNIPRRVRQGFEAALQ

SEQ ID NO: 576 - protein, 851 aa, Artificial
  HIV Env
MKVMGIQRNCQQWWIWGILGFWMLMICNGMGNLWVTVYYGVPVWKDASPTLFCASDAKAYDTEVHNVWGTFACVPTDPSPQELGLENVTENFNMWKNDMVEQMHQDIISLWDQGLKPCVKLTPLCVTLNCNAIKNNTKVTNNSINSANDEMKNCSFNITTELRDKKRKAYALFYKLDIVPLNNGSTDYRLINCNTSTITQACPKVSLDPIPIHYCAPAGYAILKCRDKTFTGTGPCHNVSTVQCTHGIKPVVSTQLLLNGSIAEGETIIRFENLTNNAKIIIVQLNESVEITCTRPSNNTRESIRIGPGQTFYATGDIIGDIRQAHCNISEEKWNKTLQKVKEKLQKHFPNKTIEFKPSSGGDLEITTHSFNCGGEFFYCNTSNLFNSTKLELFNSSTNLNITLQCRIKQIINMWQGVGRAMYAPPIEGIIMCRSNITGLLLTRDGAKEPHSTKEIFRPEGGDMRDNWRSELYKYKVVEIKPLGVAPTKPKRRVVEREKRAALGALFLGFLGAAGSTMGAASITLTVQARQLLSGIVQQQSNLLKAIEAQQHMLQLTVWGIKQLQTRVLAIERHLRDQQLLGIWGCSGKLICTTAVPWNSSWSNKSQEEIWDNMTWMQWDREISNYTDIIYNLLEVSQNQQDKNEKDLLALDKWENLWNWFNITNWLWYIKIFIMIVGGVIGLRIIFAVLSIVNRVRQGYSPLSFQTLIPHPRGPDRLGGIEEEGGEQGRDRSIRLVNGFLAIFWDDLRSLCLFSYHRLRDLILIAARTVELLGRSSLKGLQRGWETLKYLGSLVQYWGLELKKSAINLLNTTAIVVGEGTDRFIELIQRIWRAFCNIPRRIRQGLEAALQ

SEQ ID NO: 577 - protein, 857 aa, Artificial
  HIV Env
MRVRGTLRNYQQWWIWGVLGFWMLMICNGGGNLWVTVYYGVPVWKEAKTTLLCASDAKAYEREVHNVWATHACVPTDPNPQEIVLGNVTENFNMWKNDMVDQMHEDVISLWDQSLKPCVKLTPLCVTLECRNVSRNVSSYNTYNGSVEEIKNCSFNATPEVRDRKQRMYALFYGLDIVPLNKKNSSENSSEYRLINCNTSAITQACPKVTFDPIPIHYCAPAGYAILKCNNKTFNGTGPCNNVSTVQCTHGIKPVVSTQLLLNGSLAEGEIIIRSENLTNNVKTIIVHLNQSVEIVCTRPNNNTRKSIRIGPGQTFYATGDIIGDIRQAHCNISRDKWNETLQRVGKKLAEHFHNKTIKFASSSGGDLEITTHSFNCRGEFFYCNTSGLFNGTYMPTYMPNGTESNSNSTITIPCRIKQIINMWQEVGRAMYAPPIAGNITCTSNITGLLLVHDGGIKENDTENKTEIFRPGGGDMRDNWRSELYKYKVVEIKPLGVAPTAAKRRVVEREKRAVGIGAVFLGFLGAAGSTMGAASITLTAQARQLLSGIVQQQSNLLRAIEAQQHLLQLTVWGIKQLQTRVLAIERYLKDQQLLGIWGCSGKLICTTAVPWNSSWSNKTQSEIWNNMTWMQWDREVSNYTNIIYSLLEESQNQQEKNEKDLLALDSWKNLWSWFDITNWLWYIKIFIMIVGGLIGLRIIFAVLSIVNRVRQGYSPLSFQTLTPNPRGPDRLGRIEEEGGEQDKDRSIRLVNGFLALAWDDLRNLCLFSYHRLRDFISVAARVVELLGRSSWEALKYLGSLVQYWGLELKKSAISLFDSIAIVVAEGTDRIIELVQGFCRAIRNIPTRIRQGFEAALQ

SEQ ID NO: 578 - protein, 857 aa, Artificial
  HIV Env
MRVRGTLRNYQQWWIWGVLGFWMLMICNVGGNLWVTVYYGVPVWKEAKTTLFCASDAKAYEKEVHNVWATHACVPTDPNPQEIPLGNVTENFNMWKNDMVNQMHEDVISLWDQSLKPCVKLTPLCVTLECKNVKNDSTHNETYTESVKEIKNCSFNATTEIRDRKQTVYALFYRLDIVQLNSDDKKNSSEYYRLINCNTSAITQACPKVTFDPIPIHYCTPAGYAILKCKDKTFNGTGPCHNVSTVQCTHGIKPVVSTQLLLNGSLAEGEIIIRSENLTNNAKTIIVHLNQSVQIVCTRPNNNTRKSIRIGPGQTFYATGEIIGDIRQAHCNISKENWTDTLQRVSKKLAEHFPNKTIKFDSPSGGDLEITTHSFNCRGEFFYCNTSGLFNGTYNTSSDGNSSSTITIPCRIKQIINMWQEVGRAMYAPPIEGNITCKSNITGLLLVRDGGAEAKTNNTETFRPGGGDMRDNWRSELYKYKVVEIKPLGVAPTTAKRRVVEREKRAVGIGALFLGFLGAAGSTMGAASITLTVQARQLLSGIVQQQSNLLRAIEAQQHLLQLTVWGIKQLQTRVLAIERYLKDQQLLGIWGCSGKLICTTAVPWNSSWSNRSQQDIWDNMTWMQWDREISNYTNTIYRLLEDSQNQQEKNEKDLLALDSWKNLWSWFDITNWLWYIKIFIMIVGGLIGLRIIFAVLSIVNRVRQGYSPLSFQTPTPNPGGPDRLGRIEEEGGEQGKDRSIRLVNGFLALAWDDLRNLCLFSYHRLRDFILVAARVVELLGRNSLRGLQRGWEALKYLGSLVQYWGLELKKSAISLLDIIAIAVAEGTDRIIELIQRTCRAIRNIPRRIRQGFEAVLQ

SEQ ID NO: 579 - protein, 873 aa, Artificial
  HIV Env
MRVRGILRNYQQWWIWGILGFWMLMICNVVGNLWVTVYYGVPVWKEAKTTLFCASDAKAYEKEVHNVWATHACVPTDPNPQEMVLENVTENFNMWKNDMVNQMHEDVISLWDQSLKPCVKLTPLCVTLECSEYNGTSKANATNNVNATSNGNATSNGEEIQQCFFNVTTEMRDKKQRVHALFYRLDLVPLDNENKSSFSNSSKTYRLINCNTSAITQACPKVTFDPIPIHYCTPAGYAILKCNEKTFNGTGLCQNVSTVQCTHGIKPVVSTQLLLNGSLAEGEIIIRSENLTDNVKTIIVHLNQSVEIECVRPNNNTRESIRIGPGQTFYATGEIIGDIRQAHCNISADRWNETLQWVGEKLAEHFPNKTIKFAPSSGGDLEITTHSFNCRGEFFYCNTSSLFDSLFNPNGTRNDTNLTITIPCRIKQIINMWQEVGRAMYAPPIAGNITCKSNITGLLLVRDGGRGNDTENNTEIFRPGGGDMRNNWRSELYKYKVVEIKPLGVAPTKAKRRVVEREKRAVVGLGAVFLGFLGAAGSTMGAASITLTVQARQLLSGIVQQQSNLLRAIEAQQHLLQLTVWGIKQLQTRVLAIERYLKDQQLLGIWGCSGKLICTTAVPWNSSWSNKSQIEIWENMTWMQWDREINNYTQTIYRLLEDSQNQQERNEKDLLALDSWESLWNWFSISKWLWYIKIFIMIVGGLIGLRIIFAVLSIVNRVRQGYSPLSFQTLTPNPGGPDRLGRIEEEGGEQDKNRSIRLVNGFLALAWDDLRSLCLFSYHRLRDFILVAVRAVELLGRSSLRGLQRGWEALKYLGSLVQYWGIELKRSAISLLDFTAIAVAEGTDRIIELVLRICRAIRNIPTRIRQGFEIALQ

SEQ ID NO: 580 - protein, 852 aa, Artificial
  HIV Env
MRVRGTLRNYQQWWIWGVLGFWMLMICNGGKDLWVTVYYGVPVWKEAKTTLFCASDAKAYGKEVHNVWATHACVPTDPNPQEISLENVTENFNMWKSDMVNQMHEDVISLWDQSLKPCVKLTPLCVTLECGNVTQNGTYNDESNKEITNCTFNTTTEIRGRKQKVYALFYKLDIVPISETSNQSRLISCNTSVITQACPKVSFDPIPIHYCTPAGYAILKCNDKTFNGTGPCRNVSTVQCTHGIKPVVSTQLLLNGSLSEGEIIIRSENLTNNVKTIIVHLNKSVEIVCTRPNNNTRKSIRIGPGQTFYATGEIVGNIRQAHCNISKRDWNETLQRVSEKLAKHFPNKTIKFAPSSGGDLEITTHSFNCRGEFFYCNTSGLFNSTYMSGTYMNSSADMNSSYITIPCRIKQIINMWQEVGRAMYAPPIAGNITCKSNITGILLERDGGSGSNGTETFRPGGGDMRNNWRSELYKYKVVEIQPLGVAPTEAKRRVVERGKRAVGIGAVFLGFLGAAGSTMGAASITLTVQARQLLSGIVQQQSNLLRAIEAQQHLLQLTVWGIKQLQTRVLAIERYLKDQQLLGIWGCSGKLICTTAVPWNSSWSNRTQEEIWNNMTWMQWDREINNYTNTIYRLLEDSQNQQEKNEKDLLALDSWKNLWSWFDITNWLWYIKIFIMIVGGLIGLRIIFAVLSIVNRVRQGYSPLSFQTPTPNPGGPDRLGRIEEEGGGQDNVRSIRLVNGFLALAWDDLRSLCLFSYHRLRDFILVAARVVELLGHNSLRGLQRGWEALKYLGSLVQYWGLELKKSAIRLLDIIAIAVAEGTDRIIEIIQGTCRAIRNIPRRIRQGLEAALQ

SEQ ID NO: 581 - protein, 870 aa, Artificial
  HIV Env
MRVRGILRNYQQWWIWGVLGFWMLMICNVVGNLWVTVYYGVPVWKEANTTLFCASDAKAYEKEVHNVWATHACVPTDPNPQEIVMENVTENFNMWKNDMVNQMHEDVISLWDQSLKPCVKLTPLCVTLECRNVNSTGNGTHSKTYNESMKEIKNCSFNATTVIKDKKQTVYALFYKLDIVPLDNEEQENDSNSSGYYRLINCNTSALTQACPKVTFDPIPIHYCAPAGYAILKCNNKTFNGTGPCHNVSTVQCTHGIKPVVSTQLLLNGSLAEGGIIIRSENLTNNVKTIIVHLNQPVEIMCTRPDNNTRKSIRIGPGQTFYATGDIIGDIRQAHCNISEDKWNETLQNVSKKLAEHFPNKTIIFNSSSGGDLEITTHSFNCRGEFFYCNTSGLFNRTYMPNDTKSNSSSNPNANITIPCRIKQIINMWQEVGRAMYAPPIEGKITCRSNITGLLLVRDGGEDKNNTETNKTETFRPGGGDMRDNWRSELYKYKVVEVKPLGVAPTTAKRRVVEREKRAVGIGAVFLGFLGAAGSTMGAASITLTVQARQLLSGIVQQQSNLLRAIEAQQHLLQLTVWGIKQLQTRVLAIERYLKDQQLLGIWGCSGKLICTTAVPWNSSWSNRTQKEIWDNMTWMQWDREINNYTNTIYRLLEESQNQQEENEKDLLALDSWKNLWNWFDITKWLWYIKIFIIIVGGLIGLRIIFAVISIVNRVRQGYSPLSFQTLTPNPGGPDRLGRIEEEGGEQDKDRSIRLVSGFLALFWDDLRNLCLFSYHRLRDFILVAARVLELLGRRSLRGLQRGWEALKYLGSLVQYWGLELKKSAINLLDRIAIAVAEGTDRILELVQRICRAIRNIPRRIRQGFEAALQ

SEQ ID NO: 582 - protein, 863 aa, Artificial
  HIV Env
MGVKGTQMNWPHLWKWGTLILGLVIICSASDTLWVTVYYGVPVWRDADTTLFCASDANAQETEVHNVWATHVCVPTDPNPQEIHLENVTENFDMWKNNMVEQMQEDVISLWDQSLKPCVKLTPLCVTLHCTKAKLNDTYNGTAKLNDTIGDEVRNCSFNVTTELRDKKQEVHALFYVPDIVRIGEKNKNSSGNSSEYILIHCNTSVIKQACPKVTFDPIPIHYCTPAGYAILKCNEKNFNGTGPCKNVSSVQCTHGIKPVVSTQLLLNGSLAEEDIIIRSENLTNNAKTIIVHLNKSVEINCTRPFKNMRTSARIGPGQVFYKTGSITGDIRKAYCEINGTKWNETLKQVTKKLREHFKNKTIIFQPSSGGDPEITMHHFNCRGEFFYCNTTKLFNSTWTTNEIMEEFKGTNSSTITLPCRIKQVVNMWQEVGKAMYAPPISEAVNCVSNITGIILTRDGGNATNETFRPGGGNMKDNWRSELYKYKVVQIEPLGIAPTRARRRVVEREKRAVGIGAMIFGFLGAAGSTMGAASLTLTVQARQLLSGIVQQQSNLLRAIEAQQHLLQLTVWGIKQLQARVLAVERYLKDQKFLGLWGCSGKIICTTNVPWNTSWSNKSYAEIWDNMTWIEWDKEINNYTNQIYELLTKSQNQQEKNEQDLLALDKWANLWNWFSITNWLWYIKIFIMVVGGLIGLRIVFAVLSIVNRVRQGYSPLSFQTLTHHQREPDRPERIEEGGGEEGKDRSIRLVSGFLSLAWDDLRSLCLFSYHRLRDFILIAARTVELLGHSSLKGLRRGWEGLKYLGNLLSYWGQELKTSAITLFDAIAVAVAGWTDRVIEVVQRAWRALIHIPRRIRQGLERALL

SEQ ID NO: 583 - protein, 871 aa, Artificial
  HIV Env
MRVKGTRRNWPNLWKWGTLILGLVIICSASDNLWVTVYYGVPVWRDADTILFCASDAKAHVTEVHNVWATHACVPTDPNPQEIYLENVTENFDMWKNNMVEQMQEDVISLWDQSLQPCVKLTPLCVTLHCTKASFTNATSDRIKMEDAVRNCSFNMTTELQDKKQEVHALFYTSDVVQISSSVQNNNNSNTSGQNNSHKFRLIHCNTSVIKQACPKVSFDPIPIHYCAPAGYAILKCNDKNFNGTGPCKNVSSVQCTHGIKPVVSTQLLLNGSLAEEEIIIRSEDLTDNAKTIIVHLNKSIEINCTRPFKKVRISARIGPGRVFHTTGNINGDIRKAYCEINKTKWKETLKQVTRKLREHLNGTMTISFRPSSGGDPEITMHHFNCRGEFFYCNTTALFNSTWINGTMQEVNGTNSGNITLPCRIKQIVNMWQEVGRAMYAPPISEVINCVSNITGILLTRDGGINQNQTNKNETFRPGGGNIKDNWRSELYKYKVVQIEPLGIAPTKARRRVVEREKRAVGIGAMIFGFLGAAGSTMGAASITLTVQARQLLSGIVQQQSNLLRAIEAQQHLLQLTVWGIKQLQARVLAVERYLKDQKFLGLWGCSGKIICTTSVPWNSSWSNKSYEAIWNNMTWIEWDREINEYTNQIYELLTESQDQQERNEKDLLALDKWASLWNWFDITRWLWYIKIFIIIVGGLIGLRIVFAVLSIVNRVRQGYSPLSFQTLTHQQREPDRPERIEEESGEQGRDRSIRLVSGFLALAWDDLRSLCLFSYHRLRDFILIAARTVELLGHSSLQGLRRRWEGLKYLGNLLSYWVQELRISAITLLDATAITVAGWTDRVIEIVQRAWRAILHIPRRIRQGLERALL

SEQ ID NO: 584 - protein, 858 aa, Artificial
  HIV Env
MRVKGTQMNWPNLWKWGTLILGLVIMCSASDNLWVTVYGVPVWRDADTTLFCASDAKAHETEVHNIWATHACVPTDPNPQEIDLENVTENFNMWKNNMVEQMQEDVISLDQSLKPCVKLTPLCVTLDCTKADFYTTKFNTTEKPEIEISEMQKEVSNCPFNITTELRDKEQEVYALFYRSDLVPIERNSGENNGSSYRLIHCNTSVIKQACPKVSFDPIPIHYCAPAGYAILKCNDKNFNGTGPCKKVSSVQCTHGIKPVVSTQLLLNGSLAEEEIIIRSENLTNNAKTIIVHLNKSVEINCTRPFKKMRTSVRIGPGRVFYKTGSITGDIRKAYCEINGTKWNETLQQIIRKLEEHFNNKTIQFKPPYSGGDLEITMHHFNCRGEFFYCNTTRLFNISTNGTTNGTITLPCRIKQVIKMWQEVGQAMYAPPIDEAINCVSNITGILLVRDGGKIENETIETFRPGGGNMKDNWRSELYKYKVVQIEPLGVAPTGAKRRVVEREKRAVGIGAMIFGFLGAAGSTMGAASITLTVQARQLLSGIVQQQSNLLRTIEAQQHLLQLTVWGIKQLQARVLAVERYLKDQQFLGLWGCSGKIICTTSVPWNSSWSNKSYNEIWNNMTWIEWDREINNYTNQIYELLTKSQDQQERNEKDLLELDKWTSLWNWFDITRWLWYIRIFIMIVGGLIGLRIVFAVLSIVNRVRQGYSPLSFQTLTHHQREPDRPERIEEGGGEQDKDRSVRLVSGFLALVWDDLRSLCLFSYHRLRDFILIAARTVELLGHSSLEGLRRGWEGLKYLGSLLSYWGQELKTSAITLLDATAITVAGWTDRAIEIAQRACRAILHIPRRIRQGLERALL

SEQ ID NO: 585 - protein, 856 aa, Artificial
  HIV Env
MRVKETQMNWPNLWKWGTLILGLVIICSASDNLWVTVYYGVPVWKDADTTLFCASDAKAHETEVHNVWTTHACVPTDPPQEIHLENVTENFNMWKNNMVEQMQEDVISLWDQSLQPCVKLTPLCVTLHCTTAKLTNVTNITNVPNIGNITDEVRNCSFNMTTEIRDKKQKVHALFYKLDIVQIEDKNDSSKYGLINCSTSVIKQACPKISFDPIPIHYCTPAGYVILKCNDKNFNGTGPCKNVSSVQCTHGIKPVVSTQLLLNGSLAEEEIIIRSENLTNNAKTIIVHLNKSVEINCTRPSNNMRTSMRIGPGQVFYRTGSITGDIRKAYCEINGTKWNKVLKQVTEKLKEHFNNKTIIFQPPSGGDLEITMHHFNCRGEFFYCNTTQLFNNTCIGNETMKGCNGTITLPCKIKQIINMWQGTGQAMYAPPIDGKINCVSNITGILLTRDGGANNTSNETFRPGGGNIKDNWRSELYKYKVVQIEPLGIAPTRAKRRVVEREKRAVGIGAMIFGFLGAAGSTMGAASITLTVQARQLLSGIVQQQSNLLRAIEAQQHLLQLTVWGIKQLQARVLAVERYLKDQKFLGLWGCSGKIICTTAVPWNSTWSNRSFEEIWNNMTWIEWEREISNYTNQIYEILTESQNQQDRNEKDLLELDKWASLWNWFDITNWLWYIKIFIMIVGGLIGLRIIFAVLSIVNRVRQGYSPLSFQTPIHHQREPDRPERIEEGGGEQGRDRSVRLVSGFLSLAWDDLRSLCLFSYHRLRDFILIATRTVELLGHSSLKGLRRGWEGLKYLGNLLLYWGQELKISAISLLNTTAIAVAGWTDRVIEVAQGAWRAILHIPRRIRQGLERTLL

SEQ ID NO: 586 - protein, 854 aa, Artificial
  HIV Env
MRVKETQMNPNLWKWGTLILGLVIICSASDDLWVTVYYGVPVWRDADTTLFCASDAKAHETEVHNVWATHACVPTDPNPQEIHLENVTENFNMWKNNMVEQMQEDVISLWDQSLKPCVKLTPLCVTLNCTNANLTNVNNNVSNIIGNITDEVRNCSFNMTTELRDKKQQVHALFYKLDIVQMNKNSSEYRLINCNTSVIKQACPKISFDPIPIHYCTPAGYAILKCNDKNFNGTGPCKNVSSVQCTHEIKPVVSTQLLLNGSLAEEEIIIRFENLTNNAKTIIVHLNKSVEINCTRPSNNTRTSITMGPGQVFYRTGDIIGDIRKAYCEINGTKWNEVLKQVAGKLKEHFNNKTIIFKPPSGGDLEITMHHFNCRGEFFYCNTTQLFNSTWTGNETMEGSNGTITLPCKIKQIIRMWQGAGQAMYAPPISGIINCVSNITGILLTRDGGSANNTNNETFRPEGGNIKDNWRSELYKYKVVQIEPLGIAPTRAKRRVVEREKRAVGIGAMIFGFLGAAGSTMGAASITLTVQARQLLSGIVQQQSNLLRAIEAQQHLLQLTVWGIKQLQARVLAVERYLKDQKFLGLWGCSGKIICTTAVPWNSTWSNRSYEEIWNNMTWTEWEREISNYTNQIYEILTESQDQQDRNEKDLLELDKWANLWNWFSISNWLWYIKIFIMIVGGLIGLRIIFAVLSIVNRVRQGYSPLSLQTPTHHQREPDRPERIEEGGGEQGRDRSVRLVSGFLTLAWDDLRSLCLFSYHRLRDFILIAARTVELLGRSSLKGLRRGWEGLKYLGNLLLYWGQELKISAISLLDATAIAVAGWTDRVIEVAQGAWRAILHIPRRIRQGLERALL

SEQ ID NO: 587 - protein, 861 aa, Artificial
  HIV Env
MRVKETQINWPNLWKWGTLILGLVIMCSASNNLWVTVYYGVPVWRDADTTLFCASDAKAHETEVHNVWATHACIPTDPNPQEMHLENVTENFNMWKNNMVEQMQEDVISLWDQSLKPCVKLTPLCVTLNCTNANWTNANVTNVNNNVTNIVGNITEEVRNCSFNMTTELIDKKQKVYALFYKLDIRQMNSNSSEYRLINCNTSVIKQACPKVSFDPIPIHYCTPAGYAIIKCNDKNFNGTGPCKNVSSVQCTHGIKPVVSTQLLLNGSLAEEKIIIRSENLTNNAKTIIVHLHESVEINCTRPFYNKRTRTSIGQGRVLYRTGDITGNIGKPYCEINGTKWNKVLNQVTEKLKEHFNNRNISFQPPSGGDLEITMHHFICRGEFFYCNTTRLFNNTCIGNKTMKECNDTIILPCKIKQIINMWQGVGQAMYNPPISGNINCVSNITGILLTRDGGGGNGTNNEETFRPGGGNMKDNWRNELYKYKVVEIEPLGIAPTKAKRRVVEREKRAVGIGAMIFGFLGAAGSTMGAASITLTVQARQLLSGIVQQQSNLLRAIEAQQHLLQLTVWGIKQLQARVLAVERYLKDQKFLGLWGCSGKIICTTAVPNSTWSNRSYEEIWDNMTWIEWEREISNYTNQIYEILTESQNQQERNEKDLLELDKWASLWNWFGITKWLWYIKIFIMIVGGLIGLRIIFAVLSIVNRVRQGYSPLSFQTPTHHQRGEPDRPERIEEGGGEQGRDRSVRLVSGFLALAWDDLRSLCLFSYHRLRDFILIAARTVELLGHSSLKGLRRGWEGLKYLGNLLLYWGQELKISAISLFDALAVVVAGWTDRVIEVAQGAWRAILHIPRRIRQGLERALL

SEQ ID NO: 588 - protein, 861 aa, Artificial
  HIV Env
MRVKETQMSWPNLWKWRTLILGLVIICSASDNLWVTVYYGVPVWRDADTTLFCASDAKAHEAEVHNVWATHACVPTDPNPQEIHLENVTENFNMWKNNMVEQMQEDVISLWDQSLKPCVKLTPLCVTLNCTTANFTNFNLTKADNMTNVSNITIGNITDEVRNCTFNMTTDLIDKKQKVYALFYKLDTIPIGNNNNMYRLINCNDSVIKQACPKISFDPIPIHYCTPAGYAMLKCNDKNFNGTGPCKNVSSVQCTHGIKPVVSTQLLLNGSLAEEEIIIRSENLTNNAKTIIVHLNKSVEINCTRPSGKEEKRMTIGPGKVFYSTGKITGDIRKAYCVINGTKWNETLKQVAGKLREHFNNKTIIFQPPSGGDLEITMHHFNCRGEFFYCNTTKLFNSTWIGNETIGSSGNIILPCRIKQIINMWQEVGQAMYAPPITGKINCVSNITGILLTRDGGANNKSSETFRPGGGNIKDNWRSELYKYKVVEIEPLGIAPTRAKRRVVEREKRAVGIGALIFGFLGAAGSTMGAASITLTVQARQLLSGIVQQQSNLLRAIEAQQHMLQLTVWGIKQLQARVLAVERYLKDQKFLGLWGCSGKIICTTAVPWNSTWSNKSFDEIWNNMTWIEWEREISNYTNKIYDILTESQNQQDKNEKDLLELDKWASLWNWFDITSWLWYIKIFIMIVGGLIGLRIIFAVLSIVNRVRQGYSPLSFQTPLHHQREPDRPERIEEEGGEQGRDRSVRLVSGFLALAWDDLRSLCLFLYHRLRDFILIAARTVELLGHSSLKGLRRGWEGLKYLGNLLLYWGQELKISAISLLDAIAIAVAGWTDRVIKVAQRAWRAILHIPRRIRQGLERALL

SEQ ID NO: 589 - protein, 857 aa, Artificial
  HIV Env
MRVKETQMNWPNLWKWGTLILGLVIICSASDNLWVTVYYGVPVWRDADTTLFCASDAKAHETEVHNVWATHACVPTDPNPQEIHLENVTENFNMWKNNMVEQMQEDVISLWDQSLKPCVKLTPLCVTLNCTNANLTNGSSKTNVSNIIGNITDEVRNCTFNMTTELTDKKQKVHALFYKLDIVQIEDKKTSSEYRLINCNTSVIKQACPKISFDPIPIHYCTPAGYAILKCNDKNFNGTGPCKNVSSVQCTHGIKPVVSTQLLLNGSLAEEEIIIRSEDLTNNAKTIIVHLNKSVEINCTRPSNNTRTSITIGPGRVFYRTGDIIGNIRKAYCEINGTKWNKVLKQVTEKLKEHFNKTIIFQPPSGGDLEITMHHFNCRGEFFYCNTTKLFNNTCLGNETMAGCNDTITLPCKIKQIINMWQGAGQAMYAPPISGRINCVSNITGILLTRDGGVNNTDNETFRPGGGNIKDNWRSELYKYKVVQIEPLGIAPTRAKRRVVEREKRAVGIGAMIFGFLGAAGSTMGAASITLTVQARQLLSGIVQQQSNLLRAIEAQQHLLQLTVWGIKQLQARVLAVERYLKDQKFLGLWGCSGKIICTTAVPWNSTWSNRSFEEIWNNMTWIEWEREISNYTNQIYEILTESQNQQDRNEKDLLELDKWASLWNWFDITNWLWYIKIFIMIVGGLIGLRIIFAVLSIVNRVRQGYSPLSFQTPSHHQKEPDRPEGIEEGGGEQGRDRSVRLVSGFLALAWDDLRSLCLFSYHRLRDLTLIAARTVELLGHSSLKGLRRGWEGLKYLGNLLLYWGQELKISAISLLDATAIAAAGWTDRVIEVAQGAWRAILHIPRRIRQGLERTLL

SEQ ID NO: 590 - protein, 857 aa, Artificial
  HIV Env
MRVKETQMNWPNLWKWGTLILGLVIICSASENLWVTVYYGVPVWRDADTTLFCASDAKAHETEVHNVWATHACVPTDPNPQEIHMENVTENFNMWKNKMAEQMQEDVISLWDQSLKPCVKLTPLCVTLNCTNVNATNVSNTTEAPNIVGTDEVKNCSFNVTTELRDKTQQVQALFYKLDIVQMGGNDSGEYRLINCNTSVIKQACPKVSFDPIPIHYCTPAGYAILKCNDKNFNGTGPCKNVSSVQCTHGIKPVVSTQLLLNGSLAKEEIIIRSENLTNNAKTIIVHLNKSVKINCTRPTIYKKKTTMGPARVYHRTGDVIGDIRKAYCQINGTKWNKVLKQVTEKLKEHFNKTIIFQPPSGGDLEITMHHFNCRGGFFYCNTTKLFNSTWRGNETIESREGYNKTIILPCKIKQIINMWQGAGQAMYAPPINGTINCISNITGILLTRDGGDNNNTINETFRPGGGNIKDNWRSELYKYKVVQIEPLGIAPSKAKRRVVEREKRAVGIGAMIFGFLGAAGSTMGAASITLTVQARQLLSGIVQQQSNLLRAIEAQQHLLQLTVWGIKQLQARVLAVERYLKDQKFLGLWGCSGKIVCTTAVPWNSTWSNKSYEEIWDKMTWTQWEREISNYTSTIYEILTESQNQQDRNEKDLLKLDKWASLWNWFDISRWLWYIRIFIMIVGGLIGLRIVFAVLSIVNRVRQGYSPLSFQTLSHHQRDPDRPERIEEGGGEQGRDRSVRLVSGFLALAWDDLRSLCLFLYHRLRDFILIAARTVELLGHSSLKGLRRGWEGLKYLWNLLVYWGQELKISVISLLNATAIVVAGWTDRVIEVAQGAWRAILHIPRRIRQGLERALL

SEQ ID NO: 591 - protein, 869 aa, Artificial
  HIV Env
MRVMGMQRNYPLLWKWGTIIFWIMIICNAEKLWVTVYYGVPVWRNAETTLFCASDAKAYDAEVHNVWATHACVPTDPNPQEIHLKNVTEKFNMWKNNMVEQMHEDIISLWDQSLKPCVKLTPLCVTLDCHNVNSSNSSTSNSSNSSTPINRTIDSDMQEEIKNCSFNMTTELRDKKQKVSALFYRLDVVQINESGNSQYRLINCHTSAITKACPRVTLEPIPIHYCAPAGLAILKCNDKKFNGTGLCKNVSTVQCTHGIKPVVSTQLLLNGSLAEEEVVIRSENITNNAKNIIVQLVAPVRINCPRPNNNTRKSVRIGPGQTFYATGDIIGDIRQAHCNVSRSEWNRTLQQVATQLRKHFNKTIIFANSSGGDIEITTHSFNCGGEFFYCNTSELFNSTWNSTWDNSSNHIESNHTEGNITLQCRIKQIVNMWQKVGLAMYAPPISGEIRCKSNITGLLLTRDGGSNNSTNETFRPGGGDMRDNWRSELYKYKVVKIEPLGVAPTRPKRRVVEREKRAVGLGAVFLGFLGAAGSTMGAASITLTVQARQLLSGIVQQQSNLLRAIEAQQHLLKLTVWGIKQLQARVLALESYLRDQQLLGIWGCSGKLICTTNVPWNSSWSNKTYNDIWDNMTWLQWDKEVSNYTDIIYNLIEESQNQQEKNEQDLLALDQWANLWNWFGITKWLWYIKIFIMIVGGLIGLRIVFAVLTIINRVRQGYSPLSFQTLTHHQRGPDRPERIEEGGGEQDRDRSGRLVSGFLALAWDDLRSLCLFSYHRLRDFVLIAVRAVELLGHSSLKGLRLGWEALQYLGNLLLYWGQELKNSAINLLDTIALAVANWTDRVIEIGQRVGRAILNIPRRIRQGLERALL

SEQ ID NO: 592 - protein, 855 aa, Artificial
  HIV Env
MRVMGIQRNYPLFWKWGMIIFWIMIICNAEKLWVTVYYGVPVWRDAETTLFCASDAKAYDVEVHNVWATHACVPTDPNPQEIHLKNVTEKFNMWKNNMVEQMHEDIISLWDQSLKPCVELTPLCVTLDCYNVSSNSSISVKSISRDMQGEIKNCSFNMTTELRDKKQQVSALFYRLDVVQINESSNSQYRLINCNTSAIKQACPKVTFEPIPIHYCAPAGFAILKCNDKKFNGTGPCKNVSTVQCTHGIKPVVSTQLLLNGSLAEEEVVIRSENITNNAKNIIVQLVTPVRINCTRPNNNTRKSVRIGPGQTFYATGDIIGDIRKAHCNVSRSKWNNTLQQVAIQLRKHFNTTIIFANPSGGDIEITTHSFNCGGEFFYCNTSELFNSTWDNSLNHTESNHTEDNITLQCRIKQIVNMWQKVGRAMYAPPIPGEIRCESNITGLLLTRDGGSNNSTNETFRPGGGDMRDNWRSELYKYKVVKIEPLGIAPTHAKRRVVEREKRAVGLGAVFFGFLGAAGSTMGAASITLTVQARQLLSGIVQQQSNLLRAIEAQQHLLKLTVWGIKQLQARVLALERYLRDQQLLGIWGCSGKLICTTTVPWNASWSNKTYNDIWDNMTWLQWDKEISNYTDIIYNLIEESQNQQEKNEKDLLALDKWESLWNWFNITKWLWYIKIFIMIVGGLIGLRIVLAVLTVIKRVRQGYSPLSFQTLTHHQREPDRPERIEEGGGEQDKDRSVRLVSGFLALAWDDLRSLCLFSYHHLRDFVLIAVRAVELLGHSSLKGLRLGWEALKYLGNLLTYWGQELKNSAINLLDTIAIAVANWTDRVIEIGQRVGRAIRNIPVRIRQGLERALL

SEQ ID NO: 593 - protein, 846 aa, Artificial
  HIV Env
MRVRGMQRNCQNLWRWAHDFWILIICNAAENLWVTVYYGVPVWKTADTTLFCASDAKAYDTEVHNVWATHACVPTDPNPQEIHLENVTEEFNMWKNNMVEQMHVDIISLWDQSLKPCVKLTPLCVTLDCQNFKNISDGSNSEIKNCSFNMTTELRDKKQKVNALFYRVDVVQMNNSQYRLINCNTSAITQACPKVSFEPIPIHYCAPAGFAILKCKDRNFNGTGPCQNVSTVQCTHGIKPVVSTQLLLNGSLAEEEIVIRSENITNNVKNIIVQLAKPVRINCTRPNNNTRKSVRIGPGQTFYATGGIIGDIRQAHCNVSRTDWNTTLQQVATQLGKYFRDTTRIKFDNPSGGDLEIMTHSFNCGGEFFYCNTSGLFNSTWYKNSTWYSNSTASSNHTELNSTITLQCKIKQIINMWQKVGQAMYAPPIQGVIRCDSNITGLLLTRDGGSNNNTPEIFRPGGGNMRDNWRSELYKYKVVKIEPLGVAPTRAKRRVVEREKRAVGLGAVFLGFLGAAGSTMGAASITLTVQARQLLSGIVQQQSNLLRAIEAQQHLLKLTVWGIKQLQARVLALERYLSDQQLLGIWGCSGKLICTTNVPWNSSWSNRTFEDIWENMTWLQWEKEISNYTDTIYALIEDSQNQQEKNEQDLLALDKWASLWNWFDITKWLWYIKIFIMIVGGLIGLRIVFVVLAIINRVRQGYSPLSFQILTPNPRGPDRPEGIEEGGGEQDRDRSIRLVSGFLALAWDDLRNLCLFSYHRLRDLILIAARTVEILGHRVWQILKYLGNLAQYWGLELKNSAISLLNTTAIVVAEQTDRLLEFLQRAGRAILHIPRRIRQGFERALL

SEQ ID NO: 594 - protein, 854 aa, Artificial
  HIV Env
MRVMGIQKNYPLLWRWGTNIFWIMIICNAEQLWVTVYYGVPVWKTAETTLFCASDAKAYDTEVHNVWATHACVPTDPNPQEIHLENVTEKFNMWKNNMVEQMHEDIISLWDQSLKPCVKLTPLCVTLDCHNFNNSYSNSSNLTSDMNGEIKNCSFNITTEVRDKKKKMHALFYRLDVVQINENNGSQYRLINCNTSAITQACPKVSFEPIPIHYCAPAGFAILKCKDKGFNGTGPCKNVSTVQCTHGIKPVVSTQLLLNGSLAEGEVVIRSENITNNAKTIIVQLANPVKINCTRPNNNTRKGVHIGPGQAFYATGDIIGDIRQAHCNVSKTEWNKTLHQVVTQLKTYFKNTTIIFANPLGGDVEITTHSFNCGGEFFYCNTSKLFNSTWDNSNSTANHTGSNDTITLQCRIKQIVNMWQKVGQAMYAPPIQGIIRCDSNITGLLLTRDGGNNSTNETFRPGGGDMRDNWRSELYKYKVVKIEPLGVAPTRAKRRVVEREKRAVGLGAVFLGFLGAAGSTMGARSITLTVQARQLLSGIVQQQSNLLKAIEAQQHLLKLTVWGIKQLQARVLALERYLRDQQLLGIWGCSGKLICTTTVPWNSSWSNKTFNDIWDNMTWIQWEKEISNYTDIIYNLIEESQNRQEKNEQDLLALDKWASLWNWFDITNWLWYIRIFIMIVGGLIGLRIVFAVLTIINRVRQGYSPLSFQTLTHHQREPDRPERIEEGGGEQDKDRSVRLVSGFLALAWDDLRSLCLFSYHRLRDLILIAARTVELLGHNCLKGLRLGWGALKYLWNLISYWVQELKNSAINLLNTIAIVVANWTDRAIEIGQRVGRAIRNIPRRIRQGFERALL

SEQ ID NO: 595 - protein, 859 aa, Artificial
  HIV Env
MRVMGIQKNYPLLWRWGMIIFWIMTICSAGNLWVTVYYGVPVWRDAETTLFCASDAKAYDTEVHNVWATHACVPTDPNPQEIHLGNVTEDFNMWKNSMVEQMHEDIISLWDQSLKPCVQLTPLCVTLHCQDNLTSSGNISENMQGEIKNCSFNMTTELRDKKQKVYALFYRYDVVQINETGDNIQYRLINCNTSAITQACPKVSFEPIPIHYCAPAGFAILKCNDEKFNGTGPCKNVSTVQCTHGIKPVVSTQLLLNGSLAEEEIVIRSENFTNNAKIIIVQLHESVKINCTRPGNNTRKSVRIGPGQTFYATGDIIGDIRQAHCNVSWQQWNKTLHDVATKLREYFNNTTIIFDEPSGGDLEITTHSFNCGGEFFYCNTSNLFNRTWNHNGTWNAPGPFNDTEDKTINGTEDKTITLQCRIKQIVRMWQKVGQAMYAPPIPGEIRCESNITGLLLTRDGGNDNNNTETFRPGGGDMRDNWRSELYKYKVVKIEPLGVAPSHAKRRVVEREKRALVGLGAFFFGFLGAAGSTMGAASITLTVQARQLLSGIVQQQSNLLKAIEAQQHLLRLTVWGIKQLQARVLALEAYLKDQQLLGIWGCSGKLICTTTVPWNSSWSNKTYDHIWGNMTWLQWDKEISNYTHIIYDLIEESQNQQEKNEQDLLALDKWASLWDWFSISSWLWYIRIFIIIVGGLIGLRIVFAVLAIINRVRQGYSPLSFQTLTHHQREPGRPERIEEGGGGQDRDRSVRLVSGFLALAWDDLRSLCLFSYHRLRDFVSIVARTVELLGHRGWEALKYLWNLLSYWGQELKNSAISLLDTIAIVVANWTDRVIELVQRAGRAILNIPRRIRQGFERALL

SEQ ID NO: 596 - protein, 861 aa, Artificial
  HIV Env
MRVMGILKSCPPFWRWGMIMLLWILIICNAENLWVTVYYGVPVRRDAETTLFCASDAKAYETEVHNVWATHACVPTDPSPQEMHLENVTENFNMWKNNMVEQMHVDIISLWDQSLKPCVKLTPLCVTLECHNYNYTRNNSKINEVQEMKNCSFNMTTVLKDKKKKMAALFYKIDIVPIDKNATYYRLINCNTSAITQACPKVSFEPIPIHYCAPAGFAILKCNEKDFSGTGSCKNVSTVQCTHGIKPVVSTQLLLNGSLAEGDIVIRSENISNNAKTIIVQLNKPVWINCTRPSNNTRKSVRIGPGQTFYTTGAVIGDIRQAHCNVSREKWNSTLQKVVTKLGKHFNSSKIIFTNSSGGDLEITTHSFNCGGEFFYCNTAELFNSTWASNTNGIWASNINASNNKDANDTITLKCKIKQIINMWQKVGQAIYAPPIEGVIRCDSNITGILLTRDGGDNTNGDETFRPGGGDMRDNWRSELYKYKVVKIEPLGVAPSHAKRRVVEREKRAVGLGAVFLGFLGAAGSTMGAASITLTVQARQLLSGIVQQQNNLLKAIEAQQHLLKLTVWGIKQLQARVLALERYLKDQQLLGIWGCSGKLICTTTVPWNSSWSNNKTFKDIWDNMTWLQWDKEISNYTEKIYTLIEEAQNQQEKNEQDLLALDKWASLWNWFDITNWLWYILIFLMVVGGLIGLRIVFAVLAIINRVRQGYSPLSFQTLTHHQRGADRPEGIEEGGGEQDRDRSVRLVSGFLALAWDDLRSLCLFLYHRLRDFVLIAARTVELLGHSSLKGLRLGWEALKHLWNLLSYWGQELKNSAINLLDTTAVAVANWTDRVIEIVQRTGRAICNIPRRIRQGLERALQ

SEQ ID NO: 597 - protein, 839 aa, Artificial
  HIV Env
MRVKEIRKHLWRWGTLFLGMLMICSATENLWVTVYYGVPVWKEATTTLFCASDAKAYSKEVHNVWATYACVPTDPSPQEIPLKNVTENFNMGKNNMVEQMHEDIISLWDQSLKPCVKLTPLCVTLNCTDLKKEVTSTNTSSIKMMEMKNCSFNITTDLRDKVKKEYALFYKLDVVQIDNDSYRLISCNTSVVTQACPKISFEPIPIHYCAPAGFAILKCNDKKFNGTGPCTNVSTVQCTHGIKPVVSTQLLLNGSLAEEEVVIRSVNFTDNTKTIIVQLKEPVEINCTRPNNNTRKGIHIGPGRAFYATGDITGDIRQAHCNISITKWNNTLKQIVIKLRKQFGNKTIVFNQSSGGDPEIVMHSFNCGGEFFYCNTTKLFNSTWNGTEELNNTEGDIVTLPCRIKQIINMWQEVGKARYAPPIAGQIRCSSNITGLLLTRDGGNQSNVTEIFRTGGGDMRDNWRSELYKYKVVKIEPLGVAPTRAKRRVVQREKRAVGIGAVFLGFLGAAGSTMGAASITLTVQARQLLSGIVQQQNNLLRAIEAQQHLLQLTVWGIKQLQARVLAVERYLKDQQLLGIWGCSGKLICTTAVPWNTSWSNKPLDEINNMTWMEWEREINNYTGLIYNLIEESQNQQEKNEQEILALDKWASLWNWFDISKWLWYIKIFIMIVGGLVGLRIIFAVLSIVNRGRQGYSPLSFQTRLPAQRGPDRPEGIEEEDGERDRDTSIRLVNRFLALIWDDLRSLCFFIYHHLRDLLLIAARIVELLGRRGWEALKYWWNLLQYWIQELKSSAINLIGTIAIAVAGWTDRVIEIGQRFCRAMRNIPRRIRQGAEKALQ

SEQ ID NO: 598 - protein, 838 aa, Artificial
  HIV Env
MRVKEIRKHLWRWGTLLLGMLMICSATENLWVTVYYGVPVWKEATTTLFCASDAKAYSKEVHNVWATYACVPTDPSPQEIPLENVTENFNMGKNNMVEQMHEDIISLWDQSLKPCVKLTPLCVTLNCTEVKTNDTSTNASGIEMMKNCSFNITTDLRDKVKKEHALFYKLDVVQIDNDSYRLISCNTSVVTQACPKISFEPIPIHYCAPAGFAILKCNDKKFNGTGPCTNVSTVQCTHGIKPVVSTQLLLNGSLAEEEVVIRSVNFTDNTKTIIVQLKEPVEINCTRPNNNTRKGIHIGPGRAFYATGDIIGDIRQAYCNISRTKWNNTLEQIVSKLRKQFRNKTIVFNQSSGGDPEIVMHSFNCGGEFFYCNTTKLFNSTWNNTEESNNTKGDIVTLPCRIKQIINMWQEVGKAMYAPPIAGQIRCSSNITGLLLTRDGGNQNNVTEIFRPGGGDMRDNWRSELYKYKVVKIEPLGVAPTKAKRRVVQREKRAVGIGAVFLGFLGAAGSTMGAASITLTVQARQLLSGIVQQQNNLLRAIEAQQHLLQLTVWGIKQLQARVLAVERYLKDQQLLGIWGCSGKLICTTAVPWNTSWSNKSLDKIWNNMTWMEWEREINNYTGLIYNLIEESQNQQEKNEQELLALDKWASLWNWFDISKWLWYIKIFIMIVGGLVGLRIIFAVLSIVNRVRQGYSPLSFQTRLPTQRGPDRPEGIEEEGGERDRDTSIRLVNGFLALIWDDLRSLCLFIYHHLRDLLLIAARTVELLGRRGWEALKYWWNLLQYWIQELKSSAINLINTIAIAVAGWTDRVIEIGQRFCRAIRNIPRRIRQGAEKALQ

SEQ ID NO: 599 - protein, 855 aa, Artificial
  HIV Env
MRVMGMQRNYPHLWEWGTLILGLVIICSASNNLWVTVYYGVPVWRDAETTLFCASEAKAYEKEVHNIWATHACVPTDPNPQEVALINVTENFNMWKNDMVEQMHEDIISLWNEGLKPCAKLTSLCVTFTCINATTTNSTNGTVIKEGIKNCSFDITTEIRDKKKKEYALFYRIDIVPINARVPINGSNRNNSTEEYMLINCNASTIKQACPKVSFEPIPIHYCAPAGFAILKCNEKNFTGLGPCTNVSSVRCTHGIKPVVSTQLLLNGSLATEEVVIRSKNITDNTKNIIVQLAKAVKINCTRPGNNTRKSVHIGPGLTWYATGEIIGDIRQAHCNISGNDWNDTLKVISEELKRLFPNKTIKFAPPVGGDLEITTHSFNCKGEFFYCNTTPLFNSTHMQNGTNITSTDSTNSTITLQCRLKQFVRMWQEVGQAMYASPIAGSINCSSDITGIILTRDGGTNNTEIFRPGGGDMRDNWRSELYKYKVVKIEPIGVAPNKARRRVVQREKAVGIGAMFLGFLGAAGSTMGAASMTLTVQARQLLSGIVQQQSNLLRAIEAQQHLLRLTVWGIKQLQARVLALESYLKDQQLLGIWGCSGKLICTTNVPWNSSWSNKSYNDIWDNMTWLQWDKEINNYTQIIYGLLEESQNQQEKNEQDLLALDKWASLWNWFSITKWLWYIKIFIMIVGGLIGLRIIFAVLSIVNRVRQGYSPLSLQTLIPTTQRGLDRPGGTEEEGGEQDRSRSIRLVNGFLPLIWDDLRNLCLFSYRHLRNLLLIVARTVELLGIRGWEALKYLWNFLLYWGQELKNSAINLFNTTAIAVAEGTDRIIEAVQRACRAICNIPRRIRQGLERALL

SEQ ID NO: 600 - protein, 875 aa, Artificial
  HIV Env
  misc_feature (52)..(52): Xaa can be any naturally occurring amino acid
MRVMGIQRNYPHLWEWGTLILGLVIMCSASKDMWVTVYYGVPVWRDAETKPXCASDAKAYDKEIHNIWATHACVPTDPNPQELALTNVTENFNMWENSTVEQMHEDIISLWDEGLKPCVKLTPLCVALNCSNATIIINSTNNSTTNSTGNSTVKSTAEIKNCSFNITTEVRDKQKKEHALFYRLDVVPINNNVPINNTSNTSEYREYRLMSCNTSNHKQACPKVTLEPNSHTLLCPGWFCDLKCNDKNSPGLGSCTNVSPVQCTHGIKPVVSTQLLLNGSLATGGVVIRSKNFTDNPKNIIVQLDKAVKINCTGLNNNTGGSERIGIGPGHTWYATGNIVGDIRQAHCNISGSDWNEALQKVVVKLREHFPNKTIIFNQSSGGDLEITTHSFNCGGEFFYCNTSGLFNSTYMFNSTNRTNTTNGTNSTITLPCRIKQIVRMWQGVGQAMYAPPIAGSINCSSDITGIILTRDGGISNNNETNDNETLRPGGGDMRDNWRSVLYKYKVVKIEPVGIAPTGARRRVVQKEKRAVGLGALFLGFLGAAGSTMGAASLTLTVQARQLLSGIVQQQSNLLRAIEAQQHLLKLTVWGIKQLQARVLALESYLKDQQLLGIWGCFGKLICTTNVPWNSSWNNKSYNDIWGNMTWLQWDKEINNYTQIIYELLEESQIQQEKNEQDLLAFDKWANLWNWFNISNWLWYIKIFIMIVGGLIGLRIIFAVLSIVNRVRQGYSPLSFQTLIPTQREPGRPEGTEEEGGEQDRSRSIRLVNGFLPLIWDDLRNLCLFSYHHLRNLLLIAARTVELLGRRGWEALKYLWNLLLYWGQELRNSAINLLDTTAIAVAEGTDRILEAVQRACRAIRNIPRRIRQGFEKALL

SEQ ID NO: 601 - protein, 862 aa, Artificial
  HIV Env
MTVMGTQRNCPRLWTWGTFILWLVIICSASNNLWVTVYYGVPVWRDAETSPFCASDAKAYDKEVHNIWATHACVPTDPNPQEIFLKNVTEDFNMWKNNMVEQMHEDIISLWEEGLKPCVKLTPLCVALNCGDATIKSTNSTPNVTTTNEMKNCSFNITTEIRDKKKKAYALFYRLDIVPINDNNSTNSRRSSNTSDYMLINCNVSSITQACPKIKFEPIPIHYCAPAGFAILQCNEKRFNGSGPCKNVSSVQCTHGIKPVVSTQLLLNGSLSTEGVVLRSKNFTDNTKNIIVQLAEAVKINCTRPNNNTRKGVHIGPGKTWFATGEVIGDIRKAHCNISEKDWNTTLQKIVDELRKHFPNKNITFAPSAGGDVEITTHSFRLGGEFFYCNTSDLFNRTYMVNKNETNSTNTTDEKIIRLPCRIKQIVNRWQEVGQAIYAPPLQGSLTATQVITGIILTRDGGNRSDTGNETFRPGGGDMRDNWRSELYKYKVVQIEPVGVAPTRARRRVVQREKRAVGIGAVFPGLFLGAAGSTMGAASITLTVQARQLLFGIVQQQSNLLRAIEAQQQLLRLTVWGVKQLQARVLALESYLRDQQLLGIWGCSGRLICTTNVPWNSSWSNKSYEKIWDNMTWLQWDKEINNYTEIIYDLLGEAQNQQEKNEQDLLALDKWANLWSWFDISHWLWYIKIFIMIVGGLIGLRIVFAVLSIVKRVRQGYSPLSSQTLIPTTQRGPDRPEGTEGGGGEQDRIESIRLVNGFLPLVWDDLRNLCLFSYRQLRNLLLIVAKTVELLGIRGWGTLKYLWNLLLYWGQEIRSSAISLLDTTAVAVAEGTDRIIEAVQRICRAILNIPRRIRQGLERALL

SEQ ID NO: 602 - protein, 861 aa, Artificial
  HIV Env
MRVRGMQRNWPHLGKWGLLFLGILIICSATDKFWVTVYYGVPVWREAKTTLFCASDAKGYDKEVHNVWATHACVPTDPNPQEVVLGNVTENFNMWKNDMVEQMHTDIISLWDQSLKPCVKLTPLCVTLNCTDFKANSTANSTTNSTTLKEETGAVQNCSFNMTTEVNDKKLKVHALFYRLDIVPISSDDSSNSSYRLINCNTSTIKQACPKVSWDPIPIHYCAPAGYAILKCNEKKFSGTGPCKNVSTVQCTHGIKPVVSTQLLLNGSLAKEGIIIRSQNISDNAKNIIVHLNESVHINCTRPNNNTRKSIHLGPGQAFYATGDIIGDIRKAHCNVSREQWNKTLIQVAKELQSHFPNKTIKFNSSSGGDLEITMHSFNCRGEFFYCDTSKLFNATVFNDTVFNATMFNNDSDKNIILPCKIKQIVRMWQGVGQAMYAAPIAGNIACNSTITGILLARDGGNGNDSSNDTEIFRPGGGDMRDNWRSELYKYKVVEIQPLGIAPTRAKRQVVKREKRAMGIGAMFLGFLAAAGSTMGAASIALTVQARQLLSGIVQQQNNLLQAIEAQQHLLQLTVWGIKQLQARVLAVERYLKDQQLLGLWGSSGKHICSTSVPWNSSWSNKSEGEIWDNMTWMEWEKEISNYSSTIYRLIEQSQIQQEKNEQELLSLDQWASLWNWFDITKWLWYIKIFIMIVGGLIGLRIVFTVLSIVNRVRKGYSPLSFQTPFPAPRGPDRPEETEEGGGEQDRGRSIRLVNGFSALIWDDLRNLCLFSYHHLRDLTLIVVRIVELLGRRGWEALKYLWSLPQYWSRELKNSAISLLNTTAVVVAEGTDRVIEALQRAGRAILNIPRRIRQGLERALL

SEQ ID NO: 603 - protein, 853 aa, Artificial
  HIV Env
MRVRGMQRNWQHLGKWGLLFLGILIICSAADNLWVTVYYGVPVWKEANTTLFCASDAKGYEKEAHNVWATHACVPTDPNPQELALENVTENFNMWKNNMVEQMHADIISLWDQSLKSCVKLTPLCVTLNCTDATSATTTSKNISATPTSNPNDTLKEEQGAIQNCTFNITTEVKDKNKRVHALFYRLDIVSINSSRKEYRLINCNTSTIKQACPKVCWDPIPIHYCAPAGYAILKCKEKRFNGTGPCKNVSTVQCTHGIKPVVSTQLLLNGSLAEESIIIRSQNILDNTKTIIVHLNESVQINCTRPNNNTRKSIPLGPGQAFYTTGDIIGDIRKAHCNVSGAQWNKTLEQVKEELRAHIKDIGNKTIVFNSSAGGDLEITSHIFNCRGEFFYCNTSGLFNVTVPNNETITLPCRIKQIINMWQGVGQAMYAAPIAGNITCNSNITGILLTRDGGVNITNDTETFRPGGGDMRDNWRSELYKYKVVEIEPLGVAPTRAKRQVVQREKRAVGVGALLIGFLGAAGSTMGAASMTLTVQARQLLSGIVQQQNNLLQAIEAQQHLLQLTVWGIKQLQARVLAVERYLRDQQLLGLWGCSGKLICTTSVPWNSSWSNKSQEEIWENMTWMQWEKEIGQYSNTIYRLIEQSQNQQEKNEKDLLALDKWASLWNWFSISNWLWYIRIFIMIVGGLIGLRIVFTVLSVVNRVRKGYSPLSFQTLLPGPRGPDRPEGTEEEGGEQGRDRSVRLLTGLSTLIWDDLRNLCLFSYHRLRDLILIAARIVELLGRRGWEALKYLWSLLQYWSQELKNSAISLLNTTAVVVAEGTDRILEALQRAGRAVLNIPRRIRQGLERALL

SEQ ID NO: 604 - protein, 859 aa, Artificial
  HIV Env
MRVKGIQTSWQHLWKWGTLILGLVIICSASKNMWVTVYYGVPAWEDADTILFCASDAKAYSPDKHNVWATHACVPTDPNPQEISLKNVTENFNMWKNNMVDQMHEDIISLWDESLKPCVKLTPLCVTLTCTNATLGNKTLGNNSTNSTLGNNSTIVDDISKEIKNCSFNITTEIRDKTKKEYALFYRPDIVPIGDDSNNSDYRLINCNVSTIKQACPKVSFEPIPIHYCAPAGFAILKCRDKDFNGTGPCKNVSTVQCTHGIKPVVSTQLLLNGSLAEGNITIKTENITDNTKNIIVQLNQPVEIRCTRPGNNTRKSISFGPGQAFIATGDIIGDIRQAHCNVSRANWTDILGEVKVKLEEVFNNTHITFKSSAGGDLEITTHSFNCGGEFFYCNTSNLFNTSDLFNTSRGNDTNTTITLPCKIKQIVRMWQRVGQAMYAPPIAGNITCVSNITGIILTRDGNNENVSETFRPGGGDMRDNWRSELYKYKVVKIKPLGIAPTWARRRVVGREKRAVGLGAMFLGFLGTAGSTMGAASITLTVQVRQLLSGIVQQQSNLLRAIEAQQHLLQLTVWGIKQLQARILAVERYLKDQQLLGIWGCSGKLICPTNVLWNTSWSNKTYDEIWGNMTWIEWDREINNYTQQIYSLIELSQTQQEKNEQDLLALDKWANLWSWFDITNWLWYIKIFIMIVGGLIGLRIVFAVISIVNRVRQGYSPLSLQTLIPNPTGADRPGEIEEGGGEQGRTRSIRLVNGFLALAWDDLRSLCLFSYHRLRDFGLIAARTVEILGRRGWEILKYLGNLICYWGQELQNSAISLFDAAAIAVANWTDRVAEVVQRIFRAFLNVPRRIRQGFERALL

SEQ ID NO: 605 - protein, 845 aa, Artificial
  HIV Env
MRVRGIQKNWQHLWKWGTLILGLVIICSASNNLWVTVYYGVPAWEDADTILFCASDAKAYSAEKHNVWATHACVPTDPNPQEIPLKNVTENFNMWENHMVEQMHEDIISLWDESLKPCVKLTPLCVTLICTNINITSTNSTKNITVESGEEIKNCSFNVTTEIRDKQKEEYALFYRLDVVPINDGSNNNSYRLINCNASTIKQACPKVTFEPIPIHYCAPAGFAILKCRDKNFNGTGPCKNVSTVQCTHGIKPVVSTQLLLNGSLAEEEIIIKSKNLTDNTKIIIVQLNKSVEISCSRPNNNTRKSIHIGPGQAFYATGEIIGNIRKAHCNVSRKAWNSMLQNVTAKLKELFNNKNITFNSSAGGDLEVTTHSFNCGGEFFYCNTSQLFNNNITDSNETTNFTLPCKIKQIVRMWQRVAQAMYAPPIAGNIICTSNITGLLLTRDGGRNDSNSETFRPGGGDMRDNWRNELDKYKVVKIKPLGIAPTRARRRVVGKEKRAVVGLGAVFLGFLGTAGSTMGAASITLTVQVRQLLSGIVQQQSNLLRAIEAQQHLLQLTVWGIKQLQARILAVERYLKDQQLLGIWGCSGKLICPTNVPWNASWSNKTYNEIWDNMTWIEWDREINNYTQQIYSLIEESQNQQEKNEQDLLALDKWASLWSWFDISNWLWYIRIFVIIVGGLLGLRIVFAVFSIVNRVRQGYSPLSLQTLIPNPTGADRPGEIEEEGGEQGRTRSIRLVNGFLALAWDDLRSLCLFSYHRLRDFVLIAARTVGTLGHRGWEILKYLGSLVWYWGQELKNSAINLLDTTAIAVANGTDRVIEIVQRAFRAVLNIPTRIRQGFERALL

SEQ ID NO: 606 - protein, 840 aa, Artificial
  HIV Env
MRVKGIQMNWQHLWKWGTLILGLAIICSATSNLWVTVYYGVPVWEDADTILFCASDAKAYSAEKHNVWATHACVPTDPNPQEIPLENVTENFNMWKNHMVQQMHEDIISLWDESLKPCVKLTPLCVTLNCTNVTDHGINNNNTVEGKEEIKNCSFNVTTEIKDKKKKERALFYTLDVVPINDNGNNSTYRLINCNTSTIKQACPKVSFEPIPIHYCAPAGFAILKCRDKNFNGTGPCKNVSTVQCTHGIKPVVSTQLLLNGSLAEDEIIIKSENHTNNAKIIIVQLNKTVQIRCTRPSNNTRKSIPLGPGQAFYATGDIIGDIRQAHCNVSRTAWKETLQNVTEKLKQLLNTNITFNPSAGGDLEITTHSFNCRGEFFYCNTSQLFNSSIPESNETDIITLPCKIKQIVRMWQRVGQAIYAPPIAGNITCISNITGLLLTRDGNTNTTSEIIRPGGGDMRDNWRNELYKYKVVKIKPLGIAPTEARRRVVGREKRAVGIGAFFLGFLGTAGSTMGAASITLTVQVRQLLSGIVQQQSNLLRAIEAQQHLLQLTVWGIKQLQARVLAVERYLKDQQLLGIWGCSGKLICPTNVPWNASWSNRTFNEIWNNMTWIEWDREINNYTQQIYSLIEESQSQQEKNEQDLLALDKWASLWNWFDISNWLWYIKIFIMIVGGLIGLRIVFAVLSIVNRVRQGYSPLSLQTLIPNPAEVDRPGGIEEGGGEQGRNRSIRLVNGFLALAWDDLRSLCLFSYHRLRDFVLIAARTVETLGRRGWEILKYLWNLVCYWGQELKNSAISLIDTTAIAVANWTDRVIEVVQRAFRAVLNIPRRIRQGAERALI

SEQ ID NO: 607 - protein, 846 aa, Artificial
  HIV Env
MTVKGIQRNWQHLWKWGTLILGLVIICSASQNMWVTVYYGVPAWEDADTILFCASDAKAYSAEKHNVWATHACVPTDPNPQEIKLENVTENFNMWKNNMVEQMHEDIISLWEESLKPCVKLTPLCVTLNCTNVNATKYSNETVGKSLTVKDREEIKNCSFNITTEVRDQKKTEYALFYRPDVMQVDGKNSSTYRLINCNASTIKQACPKVSFEPIPIHYCAPAGFAILKCRDKNFNGTGACKNVSTVQCTHGIKPVVSTQLLLNGSLAEEEIIIKTENLTDNSKNIIVQLNKSIEIKCTRPNNNTRKSISFAPGQAFYATGDIIGDIRQAHCNVSRTDWNNMLKNVTTKLIEVFKKNITFNSSAGGDLEITTHSFNCGGEFFYCNTSQLFNSSNLNNNSSDNNGTITLPCRINQIIRMWQRVGQAMYAPPIAGNITCTSNITGLLLTRDGHNDTEIFRPGGGNMKDNWRSELYKYKVVKIKPLGIAPTKARRRVVGREKRAVVGLGAVFLGFLGTAGSTMGAASITLTVQVRQLLSGIVHQQSNLLRAIEAQQHLLQLTVWGIKQLQARVLALERYLKDQQLLGIWGCSGKLICPTNVPWNISWSNKTYSEIWDNMTWIEWDREINNYTQQIYNLIEESQNQQEKNEQELLALDKWASLWSWFDISNWLWYIKIFIMIVGGLIGLKIVFAVLSLVKRVRQGYSPLSLQTLIPNSAGVDRPGEIEGGGGEQDRTRSIRLVNGFLALAWEDLRSLCRFSYHLLRDFVLIVLRTVETLGHRGWEILKYLGNLVCYWGQELKNSAISLLDTTAIAVANWTDRVIEIVQRVFRAFLNVPRRIRQGFERALL

SEQ ID NO: 608 - protein, 845 aa, Artificial
  HIV Env
MRARGTQKNWHDLWRWGLMISGMLMICNATDNLWVTVYYGVPVWKDANTTLFCASDAQAYSPEKHNVWATHYCVPTDPNPQEILLGNVTENFNMWKNNMVEQMHEDIISLWDESLKPCVKLTPLCVTLNCAEVTSYNTTEMKNCSFNVTTELIDRRKQEYALFYKLDIVPINDNNNSSNVSDYRLINCNVSTIKQACPKVTFEPIPIHYCAPAGFAILKCRDKEFNGTGPCKNVSTVQCTHGIKPVVSTQLLLNGSLAEEKVKIRSENFTNNAKTIIVQFNNTVRINCTRPGNNTRKSIHLGPGHAFYATGAIIGDIRQAHCKVSKAEWLNTLQQVATQLRGKFNKTIIFDNPSPGGDIEITSHSFNCRGEFFYCNTSGLFNNTWLFNSTWNSSQELNGTEPNITLPCRIKQIVRMWQRVGQAMYAPPIQGEIRCDSNITGLLLTRDGGLNSTNETFRPTGGDMRDNWRSELYKYKVVEIKPLGVAPTRAKRRVVEREKRAVGIGAVLFGFLGAAGSTMGAASITLTVQVRQLLSGIVQQQSNLLKAIEAQQHLLKLTVWGIKQLQARVLAVERYLKDQQLLGIWGCSGKLICTTNVPWNISWSNKSYDEIWDNMTWIEWEREIDNYTQTIYTLLEESQTQQEKNEQDLLSLDKWASLWSWFDITNWLWYIKIFIMIVGGLIGLRIIFAVLSVVNRCRQGYSPLSFQTLNPTQQEADRPGGIEEGGGEQGRTRSIRLVSGFLAIAWDDLRNLCLFSYHRLRDFILIVARIVETLGHRGWEILKYLGNLTQYWGQELKNSAINLLNTTAIAVAEGTDRIIEIVQRVLRGILHIPRRIRQGLERALL

SEQ ID NO: 609 - protein, 844 aa, Artificial
  HIV Env
MRVKETQRNWHNLWRWGLMIFGMLMICNAEKMWVTVYYGVPVWRDADTILFCASDARTYSTEKHNVWATHSCVPTDPNPRELSLENVTENFNMWKNNMVEQMHEDVISLWDESLKPCVKLTPLCVALNCTDARDNATDIKNCTFNITTELEDKKKNERALFYRLDVVPINDSSSNIGQYRLINCNVSAVKQACSKVTFEPIPIHYCAPAGFAILKCRDKEFNGTGPCKNVSTVQCTHGIKPVVSTQLLLNGSLAEGEVRIRSENLTNNAKTIIVQLNSTVRINCTRPNNNTRKGIHIGPGQAFYATGDIIGDIKQAHCNVSRADWNNTLQQVAEQLHNNFNKTIVFNEHSGGDLEVTTHSFNCGGEFFYCNTSGLFNSTWYANDNTSTQNDMQSNDTITLPCRIKQIINMWQRVGQAVYAPPIQGELRCDSNITGLLLTRDGGEGNDTIGKETFRPTGGDMRNNWRSELYKYKVVEIKPLGVAPTKAKRRVVEREKRAVGIGAVLLGFLGAAGSTMGAASITLTVQARQLLSGIVQQQNNLLKAIEVQQHLLKLTVWGIKQLQARVLAVERYLKDQQLLGIWGCSGKLICTTNVPWNVSWSNKTYNEIWENENMTWIKWEREIDNYTQTIYTLIEESQNQQEKNEQDLLALDKWASLWNWFDISNWLWYIRIFIMIVGGLIGLRIIFAVLSIVNRCRQGYSPLSFQALTPSQQEPDRPGGTKEGGGEQGRTSSIRLVSGFLALAWDDLRNLCLFLYHQLRDFILIVARIVETLGRRGWESLKYLGNLAQYWGQELKSSAISLLNATAIAVAEGTDRIIEVAHRALRAILNIPRRIRQGFERALL

SEQ ID NO: 610 - protein, 856 aa, Artificial
  HIV Env
MRVKGIKRNYQPLWKWGIMLLGMLMMTYSAADNLWVTVYYGVPVWKEATTTLFCASDAKSYKTEAHNIWATHACVPTDPNPQEIELKNVTENFNMWKNNMVDQMHEDIISLWDQSLKPCVKLTPRCVTLNCTDASRNSTDNNSTLPTVKPGEMKNCSFNITTVVTDKRKQVHALFYRLDVVQIDNEGKNEINDTYGTYRLINCNTSAITQACPKVSFEPIPIHYCAPAGFAILKCNDKRFNGTGPCKNVSSVQCTHGIRPVVSTQLLLNGSLAEEEIVIRSENLTNNAKIIIVHLNQSVEINCTRPYKKERQRTPIGQGQALYTTRYTTRIIGQAYCNISGVKWNNTLRQVARKLGNLLNQTKIIFKPSSGGDPEITTHSFNCGGEFFYCNTSGLFNSAWNISGHSTGLNDTIITIPCRIKQIINMWQEVGKAMYAPPIEGQINCSSNITGLLLTRDGGANNTQNDTFRPGGGDMRDNWRSELYKYKVVKIEPLGVAPTKAKRRVVEREKRAIGLGAMFLGFLGAAGSTMGAASMTLTVQARQVLSGIVQQQNNLLRAIEAQQHLLQLTVWGIKQLQARILAVERYLKDQQLLGIWGCSGKHICTTTVPWNSSWSNRSVEYIWGNMTWMQWEREIDNYTGLIYNLIEESQIQQEKNEKELLELDKWASLWNWFSITQWLWYIKIFIMIVGGLIGLRIVFAVLSIVNRVRQGYSPLSFQTLLPAPRGPDRPEGIEEEGGEQDRGTSIRLVNGFSALIWDDLRNLCLFSYHRLRELILIAARIVELLGRRGWEALKYLWNLLQYWSRELKNSAISLVDATAIAVAEGTDRIIDIVRRACKAVLHIPTRIRQGLERALL

SEQ ID NO: 611 - protein, 852 aa, Artificial
  HIV Env
MRARGIERNCQNWWKWGIMLLGILMTCSAADNLWVTVYYGVPVWKEATTTLFCASDAKSYETEAHNIWATHACVPTDPNPQEIALENVTENFNMWKNNMVEQMHEDIISLWDQSLKPCVKLTPLCVTLNCSDELRNNGTMGNNVTTEEKGMKNCSFNVTTVLKDKKQQVYALFYRLDIVPIDNDSSTNSTNYRLINCNTSAITQACPKVSFEPIPIHYCAPAGFAILKCRDKKFNGTGPCTNVSTVQCTHGIRPVVSTQLLLNGSLAEEEVIIRSENLTNNAKNIIAHLNESVKITCARPYQNTRQRTPIGLGQSLYTTRSRSIIGQAHCNISRAQWSKTLQQVARKLGTLLNKTIIKFKPSSGGDPEITTHSFNCGGEFFYCNTSGLFNSTWNISAWNNITESNNSTNTNITLQCRIKQIIKMWQAGAIYAPPIERNILCSSNITGLLLTRDGGINNSTNETFRPGGGDMRDNWRSELYKYKVVQIEPLGVAPTRAKRRVVEREKRAIGLGAMFLGFLGAAGSTMGARSVTLTVQARQLMSGIVQQQNNLLRAIEAQQHLLQLTVWGIKQLQARILAVERYLKDQQLLGIWGCSGKHICTTNVPWNSSWSNRSLNEIWQNMTWMEWEREIDNYTGLIYSLIEESQTQQEKNEKELLELDKWASLWNWFSITQWLWYIKIFIMIIGGLIGLRIVFAVLSLVNRVRQGYSPLSFQTLLPAPRGPDRPEGTEEEGGERGRDRSVRLLNGFSALIWDDLRSLCLFSYHRLRDLILIAVRIVELLGRRGWDILKYLWNLLQYWSQELRNSASSLFDAIAIAVAEGTDRVIEIIQRACRAVLNIPRRIRQGLERSLL

SEQ ID NO: 612 - protein, 846 aa, Artificial
  HIV Env
MRAREKERNCQNLWKWGIMLLGMLMTCSAAEDLWVTVYYGVPIWKEATTTLFCASDAKAYKKEAHNIWATHACVPTDPNPQEIELENVTENFNMWKNNMVEQMHEDIISLWDQSLKPCVKLTPLCVTLNCTDELRNSKGNGKVEEEEKRKNCSFNVRDKREQVYALFYKLDIVPIDNNNRTNSTNYRLINCDTSTITQACPKISFEPIPIHFCAPAGFAILKCRDKKFNGTGPCSNVSTVQCTHGIRPVVSTQLLLNGSLAEEEIIIRSENLTNNVKTIIVQLNASIVINCTRPYKYTRQRTSIGLRQSLYTITGKKKKTGYIGQAHCKISRAEWNKALQQVATKLGNLLNKTTITFKPSSGGDPEITSHMLNCGGDFFYCNTSRLFNSTWNQTNSTGFNNGTVTLPCRIKQIVNLWQRVGKAMYAPPIEGLIKCSSNITGLLLTRDGGANNSSHETIRPGGGDMRDNWRSELYKYKVVKIEPIGVAPTKARRRVVEREKRAIGLGAVFLGFLGAAGSTMGAASVTLTVQARQLMSGIVHQQNNLLRAIEAQQHLLQLTVWGIKQLQARVLAVERYLRDQQLLGIWGCSGRHICTTNVPWNSSWSNRSLDEIWQNMTWMEWEREIDNYTGLIYSLIEESQIQQEKNEKELLELDKWASLWNWFSITKWLWYIKLFIMIVGGLIGLRIVFAVLSVVNRVRQGYSPLSFQTLLPVPRGPDRPEEIEEEGGERGRDRSIRLVNGLFALFWDDLRNLCLFSYHRLRDSILIAARIVELLGRRGWEALKYLWNLLQYWSQELRNSASSLLDTIAIAVAERTDRVIEVVQRACRAILNVPRRIRQGLERLLL

SEQ ID NO: 613 - protein, 844 aa, Artificial
  HIV Env
MRVRETKRNYQHLWKWGTMLLGMLMICSVTGKSWVTVYYGVPVWKEATTTLFCASDAKAYKAEAHNIWATHACVPTDPNPQEIKLENVTENFNMWKNNMVEQMHEDIISLWDQSLKPCVKLTPLCVTLNCTNWVTDTTNTTGMANCSFNITTEIRDKKKQVQALFYKLDVVKINDNDSDNTSYRLINCNTSAITQACPKMTFEPIPIHYCAPAGFAILKCNEKKFNGTGPCKNVSTVQCTHGIKPVVSTQLLLNGSLAEEEIIIRSENLTNNAKIIIVQLNESVPINCIRPYNNTRQSTRIGPGQALFTTKVIGDIRQAHCNISGAGWNKTLQQVAEKLGNLLNQTTIIFKPSSGGDPEITTHSFNCGGEFFYCNTTRLFNSTWKRNNSEWRSDNTPDETITLQCRIKQIINMWQEVGKAMYAPPIEGFINCSSNITGLLLTRDGGAINSSQNETFRPGGGDMRNNWRSELYKYKVVKLEPIGLAPTAAKRRVVEREKRAIGLGALFLGFLGTAGSTMGAVSLTLTVQARQVLSGIVQQQNNLLRAIEAQQHLLQLTVWGIKQLQARILAVESYLKDQQLLGIWGCSGKHICTTNVPWNSSWSNRSVDEIWNNMTWMEWEREIDNYTELVYSLLEVSQIQQEKNEQELLKLDTWASLWNWFSITQWLWYIKIFIMIVGGLIGLRIVFAVLSVVNRVRQGYSPLSFQTLLPAPREPDRPEGIEEEGGERDRGRSIRLVNGLSALIWDDLRNLCLFSYHRLRDLILIAARIVELLGRRGWEAIKYLWNLLQYWIQELKNSAVSLFNTIAIAVAEGTDRAIELVQRAVRAILNIPVRIRQGLERALL

SEQ ID NO: 614 - protein, 832 aa, Artificial
  HIV Env
MRVRGMQRNWQHLGKWGLLFLGILIICNAADNLWVTVYYGVPVWKEATTTLFCASDAKAYEREAHNVWATHACVPTDPNPQEVFLKNVTENFDMWKNNMVEQMHTDIISLWDQSLKPCVKLTPLCVTLNCTNATNNSQEKPGAMQNCSFNMTTEVRDKKLKLSALFYRLDIVPIGNNNSSEYRLINCNTSTITQACPKVSWDPIPIHYCAPAGYAILKCNDKRFNGTGPCKNVSTVQCTHGIKPVVSTQLLLNGSLAEEGIVIRSQNISNNAKTIIVHLNESVQINCTRPNNNTRKGIHLGPGQTFYATGAIIGDIRKAHCNISGTQWNNTLEYVKAELKSHFPNNTAIKFNQSSGGDLEITMHSFNCRGEFFYCDTSGLFNDTGSNNGTITLPCRIKQIVNMWQGVGRAMYTSPIAGNITCNSNITGLLLTRDGGNESNIETFRPEGGNMKDNWRSELYKYKVVEIEPLGVAPTKAKRQVVQREKRAAGLGALFLGFLGDSREHMGAASITLTVQARQLLSGIVQQQNNLLRAIEAQQHLLQLTVWGIKQLQARVLAVERYLKDQQLLGIWGCSGKLICTTNVPWNSSWSNKSQEEIWNNMTWMEWEKEISNYSNIIYKLIEESQNQQEKNEQELLALDKWASLWNWFDISNWLWYIKIFIMIVGGLIGLRIVFAVLSIVNRVRKGYSPLSLQTLIPSPRGPDRPEGIEEGGGEQGKDRSVRLVTGFLALAWDDLRNLCLFSYRHLRDFILIAARIVDRGLRRGWEALKYLGNLTRYWSQELKNSAISLFNTTAIVVAEGTDRIIEVLQRAGRAVLNIPRRIRQGAERALL

SEQ ID NO: 615 - protein, 846 aa, Artificial
  HIV Env
MRVRGMQRNWQHLGKWGLLFLGTLIICNAAENLWVTVYYGVPVWKEATTTLFCASDAKSYEKEAHNVWATHACVPTDPNPQEVVLENVTERFNMWENNMVEQMHTDIISLWDQSLKPCVKLTPLCVTLDCRNIATNGTNDTIAINDTLKEDPEAIQNCSFNTTTEIRDKQLKVHALFYKLDIVQINKDDNRTYRLINCDASTITQACPKVSWDPIPIHYCAPAGYAILKCNEKNFTGTGSCKNVSTVQCTHGIKPVVSTQLLLNGSLAEGEIVIRSQNISDNAKTIIVHLNESVQINCTRPNNNTRKRISLGPGRVFYTTGEIIGDIRKAHCNVSGTQWRNTLAKVKAKLGSYFPNATIKFNSSSGGDLEITRHNFNCMGEFFYCNTDELFNDTKFNDTGFNGTITLPCRIKQIVNMWQEVGRAMYANPIAGNITCNSNITGLLLTRDGGLNSTNETFRPGGGNMKDNWRSELYKYKVVEIEPLGVAPTKAKRQVVKRERRAVGLGALFLGFLGAAGSTMGAASITLTVQARQLLSGIVQQQSNLLRAIEAQQHLLQLTVWGIKQLQARVLAVERYLKDQQLLGLWGCSGKLICTTNVPWNSSWSNKSLEEIWGNMTWMEWEKEVSNYSKEIYRLIEDSQNQQEKNEQELLALDKWASLWNWFDITQWLWYIKIFIMIVGGLIGLRIVFTVLSIVNRVRKGYSPLSFQTHIPSPREPDRPEGIEEGGGEQGKDRSVRLVTGFLALAWDDLRNLCLFSYRHLRDFILIAARIVDRGLKRGWEALKYLGNLTQYWGQELKNSAISLLNATAIAVAEWTDRVIEALQRAGRAILNIPRRIRQGLERALL

SEQ ID NO: 616 - protein, 842 aa, Artificial
  HIV Env
MRVRGMQRNWQHLGKWGLLFLGMLIICKAADDLWVTIYYGVPVWKEANTTLFCASDAKSYEKEVHNVWATHACVPTDPNPQEVALNVTENFNMWENDMVEQMHKDIISLWDQSLKPCVKLTPLCVTLNCTNATTTNDTLSDQSSTLKEEPGAIQNCSFNMTTEVEDKKQKVHALFYRLDIEPISNNNSREEYRLITCNTSTITQACPKVSWDPIPIHYCAPAGYAILKCKDKRFNGTGPCRNVSTVQCTHGIRPVVSTQLLLNGSLSEGGIIIRSQNLSDNAKTIIVHLNESVQINCTRPNNNTRKSIRIGPGQSFYATGEIIGDIRKAHCNISGEQWNKTLDRVKAELKLHFNKTIQFNSSSGGDLEITMHSFNCRGEFFYCNTSLLFNNTVPNNGTITLPCRIKQFVNMWQEVGRAMYAAPIAGNITCNSNITGLLLTRDGGQSNNSDSETFRPGGGDMKDNWRSELYKYKVVEIEPLGVAPTRPKRPVVRRERRAVAIGAVFLGFLSAAGSTMGAASLTLTVQARQLLSGIVQQQNNLLQAIEAQQHMLQLTVWGIKQLQARVLAVERYLKDQQLLGLWGCSGKLICTTNVPWNSSWSNKSQDEIWNNMTWMQWEKEISNYSKTIYMLIEKSQSQQERNEQELLELDKWDSLWSWFDITNWLWYIKIFIMIVGGLIGLRIVFAVLSIVNRVRKGYSPLSLQTLIPAPTEPDRPEGIEEGGGEQGKDRSVRLVNGFLALVWDDLRNLCLFSYRHLRDFILIAARIVDRGLRRGWEALKYLGNIIQYWSQELKNSAISLFNTTAIVVAEGTDRVIEALQRAVRAVLNIPRRIRQRVERALI

SEQ ID NO: 617 - protein, 843 aa, Artificial
  HIV Env
MRVRVMQRNWQHLGKWGLLFLGILIICSAADNLWVTVYYGVPVWKEATTTLFCASDAKGYEREVHNVWATHACVPTDPNPQEIWLKNVTENFDMWKNNMVEQMHEDIISLWDQSLKPCVKLTPLCVTLHCSDVNITSNATTTNDTSTPEESGAIQNCSFNMTTEVKDKKLRVNALFYKLDIIPINNSSSSDYRLINCNTSTIKQACPKVSWDPIPIHYCAPAGYAILKCRDPRFNGTGPCKNVSTVQCTHGIRPVVSTQLLLNGSLAEEDIIIRSQNISDNAKTIIVHLNESVQINCTRPNNNTRKSIHLGPGQAFYATGDIIGDIKKAYCEINGTQWSKTKTQVQEKLRALFNKTIKFNQSSGGDLEITMHSFNCRGEFFYCDTSGLFNESEKYNGTIILPCKIKQIINMWQGVGQAMYSAPIAGRINCNSTITGLLLTRDGGQSNDTNRTETFRPEGGNMKDNWRNELYKYKVVEIEPLGVAPTKARRRVVQRERRAVGIGALFLRFLGAAGSNIGAASITLTVQARQLLSGIVQQQNNLLRAIEAQQHLLQLTVWGIKQLQARVLAVERYLKDQQLLGIWGCSGKLICTTNVPWNTSWSNKSHDEIWNNMTWMQWEKEINNYSNTIYRLIEESQNQQEKNEQELLALDKWASLWSWFDISNWLWYIKIFIMIVGGMIGLRIVFAVLSIVNRVRKGYSPLSLQTLIPSPRGPDRPEGIEEGGGEQDRNRSVRLVNGFLSLVWDDLRNLCLFSYRHLRDFILIAARTVDRGLTRGWETLKYLWNLAQYWSQELKNSAISLLNTTAIVVAEGTDRVIEVLQRAGRAVLNVPRRIRQGLERSLL

SEQ ID NO: 618 - protein, 850 aa, Artificial
  HIV Env
MRVREMQRNWQHLGRWGLLFLGILIICSAADKLWVTVYYGVPVWKEATTTLFCASDAKAYEREVHNVWATYACVPTDPSPQELVLGNVSEKFNMWKNNMVDQMHEDIISLWDESLKPCVKLTPLCVTLNCTKAIINVTSSNNTTLAPNVTISEEMKNCSFNITTEIRDKQKKEYALFYKLDVVQINNSNTSYRLINCNTSTLTQACPKVSFDPIPIHYCAPAGFAILKCNNKTFNGTGLCRNVSTVQCTHGIKPVVSTQLLLNGSLAEEKMIIRSENISDNTKTIIVQFKNPVKINCTRPNNNTRRSIHIGPGRAFYATGEIIGDTRKAHCNISEKQWYDTLIKIATEFKDQYNKTVGFQPSAGGDLEITTHSFNCRGEFFYCNTTILFNHTRVNDILSNNHTRENDTITLPCRIKQIVNMWQRVGQAMYAPPIAGKIQCNSNITGLLLTIDGGEGNESETLRPGGGDMRDNWRSELYKYKVVKIEPLGVAPTKAKRQVVQREKRAVGMGAMFLGFLGAAGSTMGAASITLTVQARNLLSGIVQQQSNLLKAIEAQQHLLQLTVWGIKQLQARILAVERYLKDQQLLGIWGCSGKLICPTTVPWNLSWSNKSQDEIWGNMTWMEWEKEIGNYTDTIYRLIESAQNQQEKNEQDLLALDKWDNLWNWFSITRWLWYIEIFIMIIGSLIGLRIVFTVLSIINRVRQGYSPLSLQTLIPNSRGPERPGGIEEEGGEQDKDRSIRLVSGFLALAWDDFRSLCVFSYHCLRNFILIAARTVDKGLKRGWEVLKYLWNLAQYWGQELKNSAISLLDRTAIAVAEGTDRIIEILQRAGRAVLNIPRRIRQGLERALL

SEQ ID NO: 619 - protein, 876 aa, Artificial
  HIV Env
MRVRERRRNWQPLGRWGILFLGIFIICNAAEDLWVTVYYGVPVWKEANTTLFCASDAKPYDTEVHNVWVTHACVPTDPNPQEVFLQNVTENFNMWKNNMVEQMHADIISLWDQGLQPCVKLTPLCVTLNCSEKININSTDLTNWANKTNNWANETTLLNITTGMRNCSFNITTMLKDKKKKQYALFYREDIVPINIKKNNKTNSNSKKNNNTSNNSIENSKYRLINCNTSAITQACPKVSFEPIPIHYCAPAGFAILKCNEKEFNGTGPCKNVSTVQCTHGIRPVISTQLLLNGSLAEKEIIIRSGNISDNTKNIIVQLNETVEIVCIRPGNNTRKSIRIGPGQTFYATGDIIGDIRQAHCNITGENWNKTLEGVKAKLHGFFTNKTIIFKPHSGGDPEVVMHTFNCGGEFFYCNTTRLFNDTLNHTIDQNITLPCKIKQIINRWQGVGQAMYAPPIAGNITCRSNITGMILTRDGGNSNDTIDNETFRPGGGNMKDNWRSELYKYKVVKIEPLGIAPTKARRRVVQREKRGAGLGALFLGFLGAAGSTMGAASITLTVQARQLLSGIVQQQSDLLRAIEAQQHLLQLTVWGIKQLQARVLAIERYLKDQQLLGIWGCSGKLICTTNVPWNSSWSNRSQDEIWNNMTWMEWENEINNYTGIIYQLIEQSQNQQEKNEQDLLALDQWASLWSWFNITQWLWYIKIFIMIVGGLIGLRIIFAVLSIVNRVRQGYSPLSFQTLIPSPRGPDRPEGTEERGGEQDRDRSTRLVSGFLALAWDDLRNLCLFSYRHLRDLILIVARILERGLRGSWEILKYLWSLVQYWGQELKNSAINLLNTTAIAVAEGTDRIIEVFQRAGRAVLNIPRRIRQGFERALL

SEQ ID NO: 620 - protein, 854 aa, Artificial
  HIV Env
MRVKGIQRNWQHLWNWGILILGLVIICSAEKLWVTVYYGVPVWEDANAPLFCASDAKAHSTESHNIWATHACVPTDPSPQEINMRNVTENFNMWKNNMVEQMHEDIISLWDESLKPCVKLTPLCVTLNCTEINNNSTRNITEEYRMTNCSFNMTTELRDKKKAEYALFYRTDVVPINEMNNENNGTNSTWYRLTNCNVSTIKQACPKVTFEPIPIHYCAPAGFAILKCVDKKFNGTGTCNNVSTVQCTHGIKPVVSTQLLLNGSLAEKDIIISSENISDNAKVIIVHLNRSVEINCTRPNNNTRRSVAIGPGQAFYTTGEVIGDIRKAHCNVSWTKWNETLRDVQAKLQEYFINKSIEFNSSSGGDLEITTHSFNCGGEFFYCNTSGLFNNSILKSNISENNDTITLNCKIKQIVRMWQRVGQAMYAPPIAGNITCRSNITGLILTRDGGDNNSTSEIFRPGGGDMKNNWRSELYKYKTVKIKSLGIAPTRARRRVVEREKRAVGVGAIFLGFLGTAGSTMGAASITLTVQVRQLLSGIVQQQSNLLRAIEAQQHLLQLTVWGIKQLRARVLALERYLKDQQLLGIWGCSGKLICTTNVPWNTSWSNKSYNEIWENMTWIEWEREIDNYTYHIYSLIEQSQIQQEKNEQDLLALDQWASLWSWFSISNWLWYIRIFVMIVGGLIGLRIVFAVLSIVNRVRQGYSPLSFQTLLHHQREPDRPAGIEEGGGEQDRDRSIRLVSGFLALAWDDLRSLCLFSYHRLRDFILIAARTVELLGRNSLKGLRLGWEALKYLWNLLLYWARELKNSAINLLDTIAIAVANWTDRVIEVAQRAGRAVLNIPRRIRQGLERALL

SEQ ID NO: 621 - protein, 849 aa, Artificial
  HIV Env
MRVKGIQRNWQHLWKWGTLILGLVIICSASDNLWVTVYYGVPVWEDADTPLFCASDAKSYSSEKHNVWATHACVPTDPNPQEIAIENVTENFNMWKNNMVEQMQEDIISLWEESLKPCVKLTPLCITLNCTNVNSANHTEANNTVENKEEIKNCSFKITTERGGKKKEEYALFYKLDVVPISNGNKTSYRLIHCNVSTIKQACPKVNFDPIPIHYCAPAGFAILKCRDKEYNGTGPCKNVSTVQCTHGIKPVVSTQLLLNGSLAEEDIRIRSENFTDNTKVIIVQLNNSIEINCIRPNNNTRKSIPIGPGQAFYATGDIIGDIRQAHCNVSRIKWREMLKNVTAQLRKIYNNKNITFNSSAGGDLEITTHSFNCRGEFFYCNTSGLFNNNISNINNETITLPCKIKQIVRMWQKVGQAMYALPIAGNLVCKSNITGLILTRDGGNNNDSTEETFRPGGGDMRDNWRSELYKYKTVKIKSLGVAPTRARRRVVEREKRAVGLGAVFLGFLGAAGSTMGAASITLTAQVRQLLSGIVQQQSNLLRAIEAQQHLLQLTVWGIKQLQSRVLAIERYLKDQQLLGIWGCSGKLICTTNVPWNTSWSNKSYNEIWDNMTWLEWEREIHNYTQHIYSLIEESQNQQEKNEQDLLALDKWASLWNWFDISNWLWYIRIFIMIVGGLIGLRIVFAVLSIVNRVRQGYSPLSFQTLTHHQREPDRLGKTEEGGGEQDRDRSTRLVSGFLALAWDDLRSLCLFSYHRLRDLVLIAARTVELLGRSSLKGLRLGWEGLKYLWNLLLYWGRELKNSAINLLDTIAIATANGTDRVIEVAQRAYRAILNVPTRIRQGLERALL

SEQ ID NO: 622 - protein, 866 aa, Artificial
  HIV Env
MRVTGIQRNWHLWKWGTLILGLVIICSASNNLWVTVYYGVPVWEDADTTLFCASDAKSYSAESHNVWATHACVPTDPNPQEIIMENVTEYFNMWKNNMVEQMHEDIISLWDESLKPCVKLTPLCVTLNCTDVTNKGNKRNNSTDNSTETNNSTVDNPGEIKNCSFNVTTEIRDKKKKEYAFFYRLDVVPINNATNYRLTHCNVSTIKQACPKVTFDPIPIHYCAPTGFAILKCRDKEFNGTGPCKNVSTVQCTHGIKPVVSTQLLLNGSLAEGKIKVRSENFTDNTKVIIVQLNKTVEINCTRPNNNTMKRIRMGIGPGQTFYATGAIIGDIRQAHCNVTKRKWKEALQNVAAELGKIFNKSSENITFNSSAGGDLEITTHSFICRGEFFYCNTSGLFNSSLLRSNSSENGTITLPCKIKQIVRMWQRVGQAMYAPPIAGNIECNSSITGLILTRDGGNNNNTNTSESEIFRPGGGDMRDNWRSELYKYKTVKIKSLGVAPTRARRRVVEREKRAVGLGAVFLGFLGAAGSTMGAASITLTVQVRQLLSGIVQQQGNLLRAIEAQQHLLQLTVWGIKQLQARLLAVERYLKDQQLLGIWGCSGKLICTTNVPWNVSWSNKSYNEIWDNMTWIEWEREINNYTYQIYSLLEESQNQQEKNEQDLLALDQWASLWNWFGITRWLWYIKIFIMIVGGLIGLRIVFAVLSIVNRVRQGYSPLSFQTLTHHQREPDRPEGIEEGGGEQGRGRSVRLVSGFLPLIWDDLRSLCLFSYHRLRDSILIVARTVELLGRSSLKGLRLGWEGLKYLWNLLLYWGRELKNSAISLLDTVAIAVANWTDRVIEVAQRACRAILNIPTRIRQGLERALL

SEQ ID NO: 623 - protein, 862 aa, Artificial
  HIV Env
TRVMETQRNYPSLWRWGTLILGMLLICSVVGNLWVTVYYGVPVWKEAKTTLFCASDAKAYDTERHNVWATHACVPTDPNPQEMVLENVTETFNMWVNDMVEQMHTDIISLWDQSLKPCVKLTPLCVTLDCSSVNATNVTKSNNSTDINIGEIQEQRNCSFNVTTAIRDKNQKVHALFYRADIVQIDEGERNKSDNHYRLINCNTSVIKQACPKVSFEPIPIHYCAPAGFAILKCNGKKFNGTGPCTNVSTVQCTHGIRPVVSTQLLLNGSLAEVEEVIIRSKNITDNTKNIIVQLNEPVQINCTRTGNNTRKSIRIGPGQAFYATGDIIGDIRRAYCNISGKQWNETLHKVITKLGSYFDNKTIILQPPAGGDIEIITHSFNCGGEFFYCNTTKLFNSTWTNSSYTNDTYNSNSTEDITGNITLQCKIKQIVNMWQRVGQAMYAPPIRGNITCISNITGLILTFDRNNTNNVTFRPGGGDMRDNWRSELYKYKVVKIEPLGVAPTEARRRVVEREKRAVGMGAFFLGFLGAAGSTMGAASITLTVQARQLLSGIVQQQSNLLRAIQAQQHMLQLTVWGIKQLQARVLAVERYLKDQQLLGIWGCSGKLICTTNVPWNSSWSNKSLDEIWDNMTWMEWDKQINNYTDEIYRLLEVSQNQQEKNEQDLLALDKWANLWNWFSITNWLWYIRIFIMIVGGIIGLRIVFAVLSIVNRVRQGYSPLSLQTLIPNQRGPDRPREIEEEGGEQDRDRSIRLVNGFLPLVWEDLRNLCLFSYRRLRDLLSIVARTVELLGRRGWEALKLLGNLLLYWGQELKNSAISLLNTTAIAVAEGTDRIIELVQRAWRAILHIPRRIRQGFERALL

SEQ ID NO: 624 - protein, 855 aa, Artificial
  HIV Env
TRVMRNYPQWWRGGILLLGMLLIYSAAGNLWVTVYYGVPVWKEAKTTLFCASDAKAYEPEKHNVWATHACVPTDPSPQEMVLANVTENFNMWDNDMVEQMQTDIISLWDQSLKPCVKLTPLCVTLDCSNITRNDTNSSSTVNATSSPSANELTNCSFNVTTVIRDKQQRVHALFYRLDVVPIDETSNNNNSNSTKYRLINCNTSVITQACPKVSFDPIPIHYCAPAGFAILKCNNKTFNGTGPCTNVSTVQCTHGIKPVVSTQLLLNGSLAEGQVIIRSKNISDNTKNIIVQLDSPIEITCTRPNNNTRKGIHFGPGQAFYATGDIIGNIRQAHCNVSEEKWNKTLQQIATQLSKYFVNRTLIFKPHSGGDLEVTTHSFNCRGEFFYCNTSGLFNSSWTGDNINMPNDTGKNITLPCRIKQIVNMWQRVGQAMYAPPIKGSITCVSNITGLILTYDEDKGNNDNVTFRPGGGDMRDNWRSELYKYKVVKIEPLGVAPTEARRRVVEREKRAVGMGAFFLGFLGAAGSTMGAASITLTVQARQLLSGIVQQQSNLLRAIQAQQHMLQLTVWGVKQLQARVLAVERYLKDQQLLGIWGCSGKLICTTNVPWNSTWSNKSLAEIWDNMTWMEWDRQIDNYTEVIYRLLELSQTQQEQNEQDLLALDKWDSLWNWFSITNWLWYIKIFIIIVGALIGLRIIFAVLSIVGRVRQGYSPLSFQTLIPNPRGPDRPEGIEEEGGEQDRGRSVRLVNGFLPIVWDDLRSLCLFSYRLLRDSLLIVIRTVELLGRRGREALKYLWNLLQYWGQELKNSAINLLNTTAIVVAEGTDRIIEIVQRAWRAVLHIPRRIRQGLERILL

SEQ ID NO: 625 - protein, 848 aa, Artificial
  HIV Env
TRVMETQRNYPSLWRWGTLILGMLLICSAAQNLWVTVYYGVPVWKEAKTTLFCASDAKAYETEKHNVWATHACVPTDPNPQEMVMENVTESFNMWENNMVEQMHTDIISLWDQSLKPCVKLTPLCVTLNCTNVRNNTSNSTSSMEAGGELTNCSFNVTTVLRDKQQKVHALFYRLDVVPIDNNSTQYRLINCNTSVITQACPKVSFEPIPIHYCAPAGFAILKCNNKTFNGTGLCTNVSTVQCTHGIRPVVSTQLLLNGSLAEEQIIIRTKNISDNTKNIIVQLKTPVNITCTRPNNNTRTSIHLGPGRAFYATGDIIGDIRQAHCNISRTDWNKTLHQVVTQLGIHLNNRTISFKPNSGGDMEVRTHSFNCRGEFFYCNTSGLFNSSWEMHTNYTSNDTKGNENITLPCRIKQIVNMWQRVGRAMYAPPIQGNIMCVSNITGLILTIDEGNASAENYTFRPGGGDMRDNWRSELYKYKVVKIEPLGIAPTKTRRRVVEREKRAVGMGASFLGFLGAAGSTMGAASITLTVQARQLLSGIVQQQSNLLRAIQARQHMLQLTVWGIKQLQARVLAVERYLRDQQLLGIWGCSGKLICTTNVPWNSSWSNKSQSEIWDNMTWMEWDKQISNYTEEIYRLLEVSQTQQEKNEQDLLALDKWASLWTWFDISHWLWYIKIFIMIVGGLIGLRIIFAVLSIVNRVRQGYSPLSFQTLVPNPRGPDRPEGTEEGGGEQDRDRSVRLVNGFLPVVWDDLRSLSLFSYRLLRDLLLIVVRTVELLGRRGREALKYLWNLLQYWGQELKNSAIDLLNTTAIAVAEGTDGIIVIVQRAWRAILHIPRRIRQGFERSLL

SEQ ID NO: 626 - protein, 853 aa, Artificial
  HIV Env
  misc_feature (557)..(557): Xaa can be any naturally occurring amino acid
TRVMETQTSWLSLWRWGLMIFGMLMICSARENLWVTVYYGVPVWRDAKTTLFCASDAKAYSTEKHNVWATHACVPTDPNPQEMSLPNVTENFNMWKNDMVDQMQEDIISVWDESLKPCVKITPLCVTLNCSDVNSNNSTDSNSSASNNSPEIMKNCSFNVTTEIRNKRKQEYALFYRQDVVPINSDNKSYILINCNTSVIKQACPKVSFQPIPIHYCAPAGFAILKCNNKTFNGTGPCKNVSTVQCTHGIKPVVSTQLLLNGSVAEGDIIIRSENISDNAKNIIVQLNDTVEIVCTRPNNNTRKGIHMGPGQVLYATGEIIGDIRKAYCNISRKDWNNTLRRVAKKLREHFNKTIDFTSPSGGDIEITTHSFNCGGEFFYCNTSTLFNSSWDENNIKDTNSTNDNTTITIPCKIKQIVRMWQRTGQAIYAPPIAGNITCKSNITGLLLTRDGGNRNGSENGTETFRPTGGNMKDNWRSELYKYKVVELEPLGVAPTKAKRRVVEREKRAVGIGAVFLGFLGTAGSTMGAASITLTVQVRQLLSGIVQQQSNLLKAIXAQQHLLKLTVWGIKQLQARVLAVERYLKDQQLLGIWGCSGKLICTTNVPWNASWSNKSYEDIWENMTWIQWEREINNYTGIIYSLIEEAQNQQETNEKDLLALDKWTNLWNWFNISNWLWYIKIFIMIIGGLIGLRIIFAVLAIVNRVRQGYSPLSFQTLIPNPTEADRPGGIEEGGGEQGRTRSIRLVNGFLALAWDDLRSLCLFSYHRLRDFVLIAARTVGTLGLRGWEILKYLVNLVWYWGQELKNSAISLLNTTAIAVAEGTDRIIEIAQRAFRAILHIPRRIRQGLERALL

SEQ ID NO: 627 - protein, 851 aa, Artificial
  HIV Env
  misc_feature (402)..(402): Xaa can be any naturally occurring amino acid
TRVMETQKNWQTLWRGGLMIFGMLMICKAKEDLWVTVYYGVPVWKDAKTTLFCASDAKAYSTEKHNVWATHACVPTDPSPQEMNLPNVTENFNMWKNDMVDQMQEDIISVWDESLKPCVKITPLCVTLNCSNITSNSNTTSNSSVSSPDIMTNCSFNITTEIRNKRKQEYALFYRQDVVPIDSNNKNYILINCNTSVIKQACPKVSFQPIPIHYCAPAGFAILKCNDKNFNGTGSCKNVSTVQCTHGIKPVVSTQLLLNGSIAEGDIIIRSENISDNAKNIIVQLNKTVEIVCYRPNNNTRKGIHMGPGQVLYATGEIIGNIRETHCNISERDWSNTLRRVATKLREHFNKTINFTSPSGGDIEIVTHSFNCGGEFLYCNTSKLFNSSWDKNSIEATNDTSXATITIPCKIKQIVRMWQRTGQAIYAPPIAGNITCTSNITGLLLTRDGGNRGNGSENGTETFRPTGGNMKDNWRSELYKYKVVEIEPLGVAPTKAKRRVVEREKRAVGIGAVFLGFLGTAGSTMGAASITLTVQVRQLLSGIVQQQSNLLKAIEAQQHLLKLTVWGIKQLQARVLAVERYLKDQQLLGIWGCSGKLICTTNVPWNASWSNKSYEDIWENMTWIQWEREINNYTGIIYSLIEEAQNQQENNEKDLLALDKWTNLWNWFNISNWLWYIKIFIMIIGGLIGLRIIFAVLAIVNRVRQGYSPLSFQTLIPNPTEADRPGGIEEGGGEQGRTRSIRLVNGFLALAWDDLRNLCLFSYHRLRDFVLIAARTVGTLGLRGWEILKYLVNLVWYWGQELKNSAISLLNTTAIAVAEGTDRIIEIAQRAFRAILHIPRRIRQGLERALL

SEQ ID NO: 628 - protein, 851 aa, Artificial
  HIV Env
MRAREIQRNWQHLGKRGILFLGILIICSAANNLWVTVYYGVPVWKEATTTLFCASDAKAYETEVHNVWATHACVPTDPNPQEVVLENVTENFNMWKNNMVEQMHTDIISLWDESLKPCVKLTPLCVTLTCTNVTNNRTNANKNDTNINATVTSTDEIKNCSFNITTELKDKKKRVSALFYKLDIVQIKQSEINQSESEDRLINCNTSTVTQACPKVSFEPIPIHYCAPAGFAILKCNNNTCNGTGPCTNVSTVQCTHGIKPVVSTQLLLNGSLAEEEIIIRSEDITKNTKNIIVQLNEAVEINCTRPSNNTRKSIHIGPGRAFYATGDIIGDIRQAHCNISGGQWNKTVNQVKKELGKHFNKTIIFQPSSGGDPQVTRHIFNCRGEFSYCDTTDTVDDTEEEEDTTITIPCRIKQIINMWQKVGQAIYAPPTAGNITCRSNITGMILTRDGGNDNNTRTEETFRPGGGDMRDNWRSELYKYKVVQIEPLGIAPTRARRRVVQREKRAVGIGALFLGFLGAAGSTMGAASITLTVQARQLLSGIVQQQNNLLRAIEAQQQMLQLTVWGIKQLRARVLAVERYLRDQQLLGIWGCSGKLICTTNVPWNSSWSNKSQSEIWENMTWMQWEKEISNHTSTIYRLIEESQIQQEKNEQDLLALDKWASLWNWFDISNWLWYIKIFIMIVGGLIGLRIVFTVLSVVNRVRQGYSPLSFQTLTPSPRGPDRPEGIEEGGGEQDKDRSVRLVSGFLALAWDDLRNLCLFSYRHLRDLVLIATRILDRGLKGSWEALKYLWNLILYWGQEIKNSAINLLNTTAIAVAEGTDRIIEIVYRAFRALLHIPRRIRQGFERLLL

SEQ ID NO: 629 - protein, 842 aa, Artificial
  HIV Env
MRVRGMQRNWQTLGNWGILFLGILIICSNADKLWVTVYYGVPVWKEATPTLFCASDAKAYEKEVHNVWATHACVPTDPNPQEVEMENVTENFNMWKNNMVEQMHTDIISLWDESLKPCVELTPLCVTLNCTDYKGTNSTNNATSTVVSPAEIKNCSFNITTEIKDKKKKESALFYRLDVLPLNGEGNNSSTEYRLINCNTSTITQTCPKVTFEPIPIHYCAPAGFAILKCKDKRFNGTGPCKNVSTVQCTHGIKPVVSTQLLLNGSLAEEEIIIRSENITDNTKNIIVQLNETVQINCTRPNNNTRKSIHMGPGKAFYTTGDIIGDIRQAHCNISGEKWNMTLSRVKEKLKEHFKNGTITFKPPNPGGDPEILTHMFNCAGEFFYCNTTKLFNETGENGTITLPCRIKQIINMWQKVGKAIYAPPIAGSINCSSNITGMILTRDGGNNTHNETFRPGGGDMRDNWRSELYKYKVVQIEPLGIAPTRARRRVVQREKRAVGLGAVFFGFLGAAGSTMGAASITLTVQARQLLSGIVQQQSNLLRAIEAQQHLLQLTVWGIKQLRARILAVERYLKDQQLLGIWGCSGKLICTTNVPWNSSWSNKSWEEIWNNMTWMEWEKEIGNYSDTIYKLIEESQTQQEKNEQDLLALDKWASLWNWFDITKWLWYIKIFIMIIGGLIGLRIAFAVLSVVNRVRQGYSPLSFQTLIPTSRGADRPEGIEEEGGEQDKNRSVRLVSGFLALAWDDLRNLCLFSYRQLRNLILIVTRILERGLRGGWEALKYLWNLVQYWSQELKNSAISLLNTTAIAVAGGTDRIIEIGQRAFRALLHIPRRIRQGLERALL

SEQ ID NO: 630 - protein, 852 aa, Artificial
  HIV Env
MKVMGMQSGWMGMKSGWLLFYLLVSLIKVIGSEQHWVTVYYGVPVWREAETTLFCASDAKAHSTEAHNIWATQACVPTDPNPQEVLLPNVTEKFNMWENKMADQMQEDIISLWEQSLKPCVKLTPLCVTMLCNDSYGEERNNTNMTTREPDIGYKQMKNCSFNATTELTDKKKQVYSLFYVEDVVPINAYNKTYRLINCNTTAVTQACPKTSFEPIPIHYCAPPGFAIMKCNEGNFSGNGSCTNVSTVQCTHGIKPVISTQLILNGSLNTDGIVIRNDSHSNLLVQWNETVPINCTRPGNNTGGQVQIGPAMTFYNIEKIVGDIRQAYCNVSKELWEPMWNRTREEIKKILGKNNITFRARERNEGDLEVTHLMFNCRGEFFYCNTSKLFNEELLNETGEPITLPCRIRQIVNLWTRVGKGIYAPPIRGVLNCTSNITGLVLEYSGGPDTKETIVYPSGGNMVNLWRQELYKYKVVSIEPIGVAPGKAKRRTVSREKRAAFGLGALFLGFLGAAGSTMGAASITLTVQARTLLSGIVQQQNILLRAIEAQQHLLQLSIWGIKQLQAKVLAIERYLRDQQILSLWGCSGKTICYTTVPWNETWSNNTSYDTIWNNLTWQQWDEKVRNYSGVIFGLIEQAQEQQNTNEKSLLELDQWDSLWSWFGITKWLWYIKIAIMIVAGIVGIRIISIVITIIARVRQGYSPLSLQTLIPTARGPDRPEETEGGVGEQDRGRSVRLVSGFSALVWEDLRNLLIFLYHRLTDSLLILRRTLELLGQSLSRGLQLLNELRTHLWGILAYWGKELRDSAISLLNTTAIVVAEGTDRIIELAQRIGRGILHIPRRIRQGLERALI

SEQ ID NO: 631 - protein, 859 aa, Artificial
  HIV Env
  misc_feature (568)..(568): Xaa can be any naturally occurring amino acid
MKAMEKRNKKLWTLYLAMALITPCLSLRQLYATVYAGVPVWEDATPVLFCASDANLTSTEKHNIWASQACVPTDPTPYEYPLHNVTDDFNIWKNYMVEQMQEDIISLWDQSLKPCVQMTFLCVQMECTNIAGTTNENLMKKCEFNVTTVIKDKKEKKQALFYVSDLMELNETSSTNKTNSKMYTLTNCNSTTITQACPKVSFEPIPIHYCAPAGYAIFKCNSTEFNGTGTCRNITVVTCTHGIRPTVSTQLILNGTLSKGKIRMMAKDILEGGKNIIVTLNSTLNMTCERPQIDIQEMRIGPMAWYSMGIGGTAGNSSRAAYCKYNATDWGKILKQTAERYLELVNNTGSINMTFNHSSGGDLEVTHLHFNCHGEFFYCNTAKMFNYTFSCNGTTCSVSNVSQGNNGTLPCKLRQVVRSWIRGQSGLYAPPIKGNLTCMSNITGMILQMDNTWNSSNNNVTFRPIGGDMKDIWRTELFNYKVVRVKPFSVAPTRIARPVISTRTHREKRAVGLGMLFLGVLSAAGSTMGAAATTLAVQTHTLLKGIVQQQDNLLRAIQAQQQLLRLSXWGIRQLRARLLALETLLQNQQLLSLWGCKGKLVCYTSVKWNRTWIGNESIWDTLTWQEWDRQISNISSTIYEEIQKAQVQQEQNEKKLLELDEWASIWNWLDITKWLWYIKIAIIIVGALVGVRVIMIVLNIVKNIRQGYQPLSLQIPNHHQEEAGTPGRTGGGGGEEGRPRWIPSPQGFLPLLYTDLRTIILWTYHLLSNLASGIQKVISYLRLGLWILGQKIINVCRICAAVTQYWLQELQNSATSLLDTLAVAVANWTDGIIAGIQRIGTGIRNIPRRIRQGLERSLL

SEQ ID NO: 632 - protein, 872 aa, Artificial
  HIV Env
MKVMKKNNRKSWSLYIAMALLIPCLSYSKQLYATVYSGVPVWEEAAPVLFCASDANLTSTEQHNIWASQACVPTDPNPHEFPLGNVTDNFDIWKNYMVDQMHEDIISLWEQSLKPCEKMTFLCVQMNCVDLQTNKTGLLNETINEMRNCSFNVTTVLTDKKEQKQALFYVSDLSKVNDSNAVNGTTYMLTNCNSTIIKQACPKVSFEPIPIHYCAPTGYAIFKCNDTDFNGTGLCHNISVVTCTHGIKPTVSTQLILNGTLSREKIRIMGKNITESAKNIIVTLNTPINMTCIREGIAEVQDIYTGPMRWRSMTLKRSNNTSPRSRVAYCTYNKTVWENALQQTAIRYLNLVNQTENVTIIFSRTSGGDAEVSHLHFNCHGEFFYCNTSGMFNYTFINCTKSGCQEIKGSNETNKNGTIPCKLRQLVRSWMKGESRIYAPPIPGNLTCHSNITGMILQLDQPWNSTGENTLRPVGGDMKDIWRTKLYNYKVVQIKPFSVAPTKMSRPIINIHTPHREKRAVGLGMLFLGVLSAAGSTMGAAATALTVRTHSVLKGIVQQQDNLLRAIQAQQHLLRLSVWGIRQLRARLQALETLIQNQQRLNLWGCKGKLICYTSVKWNTSWSGRYNDDSIWDNLTWQQWDQHINNVSSIIYDEIQAAQDQQEKNVKALLELDEWASLWNWFDITKWLWYIKIAIIIVGALIGIRVIMIILNLVKNIRQGYQPLSLQIPVPHRQEAETPGRTGEEGGEGDRPKWTALPPGFLQQLYTDLRTIILWTYHLLSNLISGIRRLIDYLGLGLWILGQKTIEACRLCGAVMQYWLQELKNSATNLLDTIAVSVANWTDGIILGLQRIGQGFLHIPRRIRQGAERILV

SEQ ID NO: 633 - protein, 882 aa, Artificial
  HIV Env
MTVTMKVMEQRNRKLGILCIVMALITPCLSYNQHYATVYAGVPVWEEATPVLFCASDANLTSTEQHNIWASQACVPTDPSPYEYPLTKVTDNFNIWKNYMVEQMQEDIISLWEQSLKPCVQMTFLCVQMNCTNYVQGNYTNNSSINNDTSSPENLVKQCEFNVTTVVKDKKEKKQALFYVSDLMKINEANDTKDMYTLINCNSTTIKQACPKVSFEPIPIHYCAPAGYAIFKCNSTEFNGTGPCNNITAVTCTHGIKPTVSTQLILNGTLSEGNIRIMGKNISDNMKNIIVTLNSTINMTCVRQGNQSVQEIQIGPMAWYSMSLAQEGKPNNSRIAYCKYNISDWEKALKQTAERYLDLRNNTNTVNITFERSIGGDSEVTHLHFNCHGEFFYCNTSKMFNYTFSCIGTNCTSNQNSSNSNDTRIYCRIKQVVRSWIQGGSGLYAPPRKGNLTCSSLITGMILQLDMPWNSTNNSNATFRPTGGDMKDIWRTELFKYKVVKVKPFSVAPTKIARPVIGTGTQREKRAVGLGMLFLGVLSAAGSTMGAAATALAVQTQSLMKGIVQQQDNLLRAIQAQQQLLRLSVWGIRQLRARLLALETLIQNQQLLNLWGCKGKLICYTSVKWNTTWTNCTNTNKLDDIWDKLTWQQWDQQISNVSSIIYEEIRNAQVQQEQNEKKLLELDEWASIWNWLDITKWLWYIKIAIIIVGALIGVRIVMIVLNLVKNIRQGYQPLSFKTHIHHQPEAEAPGGTGEGGGERGMPTLIPWPQGFLPLLYTDLRTIILWSYHLLSNLASGIQTVISHLGLGLWTLGQKIISACRLCIAVIQYWLQELQNSATSLLDTIAVAVANWTVTIILGIQRIGRGILNIPRRIRQGLERSLL

SEQ ID NO: 634 - protein, 872 aa, Artificial
  HIV Env
MTVTMKVMEKRNRKLGILCMVMALITPCLSHNQHYATVYAGVPVWEEATPVLFCASDVNLTSTEQHNIWASQACVPTDPSPYEYPLKNVTDNFNIWENYMVEQMQEDIISLWEQSLKPCVQMTFLCVQMNCTNVNDETNSSVKNDTSSSENLMKKCEFNVTTVLKDKKEKQQALFYVSDLMKVNENNDTMYTLINCNSTTIKQTCPKVSFEAIPIHYCAPAGYAIFKCNNTGFNGTGPCTNVTVVTCTHGIRPTVSTQLILNGTISEGKIRIMGKNISDTGKNIIVTINSTINMTCERPGNQTVQKILTGPVAWYSMGLKNNLTNSRAASCKYNSSVWEEALKQTAERYLELMNNTNTVNITFNHSTGGDPEVTHLHFNCHGEFFYCNTSQMFNYTFSCTRTNCIRQSNSSINGTISCRIKQVVRSWIQGGSGLYAPPRPGYLTCNSSITGMILQLDKTWNRTNNSESTFRPIGGDMKDIWRTELFKYKVVKIKPFSVAPTKIARPVIGTGTRREKRAVGLGMLFLGVLSAAGSTMGAAATTLAVQTHTLMKGIVQQQDNLLRAIQAQQQLLRLSVWGIRQLRARLLALETLIQNQQLLNLWGCKGRLVCYTSVKWNRTWTNNNTDLDTIWGNLTWQEWDQQISNISATIYDEIQKAQVQQEHNEKKLLELDEWASIWNWLDITKWLWYIKIAIIIVGALIGVRIVMIVLNLVRNIRHGYQPLSFQTPTHHQQPEAQAPGGTGEGGGERDRLRSIPSPQGFLPLLYTDLRTIILWSYHLLSNLASGIQTVISHLGLGLWILGQKIISACRICIAVIQYWLQELQNSATSLLDTLAVAVANWTDGIILGLQRIGRGILNIPRRIRQGLERALL

SEQ ID NO: 635 - protein, 847 aa, Artificial
  HIV Env
MRVKEIQRNYQHLWKWSLIILGMIMICKAIEKSWVTVYYGVPVWKDAETTLFCASDAKAYEKESHNVWATHACVPTDPSPQELVLGNVTENFNMWKNKMVEQMHEDIISLWDQSLKPCVKLTFLCVTLNCIDVKNSTNNNTEEATITNCSFKVPTELKDKTETVHTLFYKLDVVPLNVTNNSSISSTYRLINCNTSTITQACPKVSFEPIPIHYCAPAGFAILKCNDKKFNGTGPCKNVSTVQCTHGIRPVVSTQLLLNGSLSEEEVIIRSENITNNAKTIIVQLNETVKINCTRPGSDKKIRQSIRIGPGKVFYAKGGITGQAHCNITDGEWRNTLQQVAIALRRQFNNKSIIFNSSSGGDIEITTHTFNCGGEFFYCNTSELFTGIWNGTWDKNCTSTESNCTGNITLPCRIKQVVRTWQGVGQAMYAPPIEGTIRCSSNITGLLLTRDGGNGNATQNETFRPGGGDMKDNWRSELYKYKVVKIEPLGVAPTRAKRRVVEREKRAVGMGALFLGFLGAAGSTMGAASMALTAQARQLLSGIVQQQNNLLRAIEAQQHLLQLTVWGIKQLQARVLAVERYLESQQLLGLWGCSGKLICTTTVPWNSSWSNKSLDNIWDNLTWMEWDREISNYTQVIYGLLEDSQKQQEKSEKDLLELDKWASLWNWFDITNWLWYIKIFIMIVGGLIGLRIVFTVFSIINRVRQGYSPLSFQTLLPTPRGPDRPGRTEEEGGEEDNNRSVRLVNGFLALAWEDLRSLCIFSYHRLRDLILIVVKGLRRGWEALKYLGNLVLYWGQELKNSAISLLNATAIVVAEGTDRIIEVGQRICRAILNIPRRIRQGFERALL

SEQ ID NO: 636 - protein, 206 aa, Artificial
  HIV Nef
MGGKWSKSSIVGWPAVRERIRRTDPAAEGVGAASQDLDRHGAITSSNTPTTNAACAWLEAQEEDEVGFPVRPQVPLRPMTYKGALDLGFFLKEKGGLEGLIYSTKRKEILDLWVYHTQGYFPDWQNYTPGPGTRYSLTFGWPFKLVPVDPKEVEEANEGENNCLLHPMSQHRIDDDHREVLMWKFDSSLARRHVARELHPEYYKDC

SEQ ID NO: 637 - protein, 207 aa, Artificial
  HIV Nef
MGGKWSKSSIVGWPEVRERIRRTEPAAEGVGAASQDLDKYGALTSSNTANTNAACAWLEAQEKEEEVGFPVRPQVPLRPMTYKGAVDLSWFLKEKGGLEGLIYSKKRQEILDLWVYNTQGYFPDWQNYTPGPGVRYPLTLGWCFKLVPVDPREAEEETKGENSCLLHPMSQHGMEDSEREVLRWKFDSSLARRHMARELHPEYYKDC

SEQ ID NO: 638 - protein, 207 aa, Artificial
  HIV Nef
MGGKWSKSSLTGWPAVRERIRRTEPAAEGVGEASQDLDKHGALTTSNTAANNADCAWLQAHEEEGEVGFPVRPQVPLRPMTFKGAFDLGFFLKEKGGLEGLIWSQKRQDILDLWVYHTQGYFPDWQNYTPGPGVRYPLTFGWPFKLVPVDPTEVEEANEGENNCLLHPMSQHGMDDKDREVLKWQFDSSLVRRHMARELHPEYYKDC

SEQ ID NO: 639 - protein, 210 aa, Artificial
  HIV Nef
MGGKWSKSSIVGWPAVKERIRRTNPRTERAAVGVGAASQDLDKYGALTANNTPANNADCARLQAQEEDNEVGFPVRPQVPLRPMTYKGAFDLGFFLKEKGGLDGMIYSKKRQDILDLWVYNTQGYFPDWQNYTPGPGVRYPLTFGWCYKLVPVDPKEVDANEGENNCLLHPMSQHGMDDEDREVLKWVFDSSLARRHMARELHPEYYKDC

SEQ ID NO: 640 - protein, 207 aa, Artificial
  HIV Nef
MGNKWSKSSIVGWPAVRDRMRRAEPAAEGVGPASQDLGRHGALTTSNTAHNNADCAWLEAQEEEGGVGFPVRPQVPLRPMTYKAAFDLSFFLKEKGGLDGLIYSKKRKEILDLWVYHTQGFFPDWQCYTPGPGTRLPLTFGWCFKLVPVDPREVEEANEGENNCLLHPMSQQGMEDEDREVLRWKFDSSLARRHLARELHPEYYKDC

SEQ ID NO: 641 - protein, 206 aa, Artificial
  HIV Nef
MGGKWSKRSKADWPAVREKLRTTEPAAEGVGAASQDLAKHGALTSSNTAHNNADCAWLEAQEEEEVGFPVRPQVPLRPMTYKGAFDLGFFLKEKGGLEGLIYSKKRQEILDLWVYHTQGYFPDWQNYTPGPGVRYPLTFGWPFKLVPVDPREVQEANKGENNCLLHPMSQHGADDEDREVLMWKFDSHLAYRHMARELHPEYYKDC

SEQ ID NO: 642 - protein, 209 aa, Artificial
  HIV Nef
MGNKWSKSWPAVRERIRRTRPARGNEPAAEGVGAASQDLDKYGALTSSNTPTTNAACAWLEAQEEAEEVGFPVRPQVPLRPMTYKAAFDLGFFLKEKGGLEGLIHSKQRQDILDLWVYHTQGYFPDWQNYTPGPGIRYPLTFGWCFKLVPVDPKEVEEANEGEDNCLLHPMSLHGMEDDHGEVLMWKFDSALARRHMARELHPEYYKDC

SEQ ID NO: 643 - protein, 207 aa, Artificial
  HIV Nef
  misc_feature (95)..(95): Xaa can be any naturally occurring amino acid
MGSKWSKSSIVGWPKVRETIRRTEPAAEGVGAASQDLDKYGALTTSNTDTNNADCAWLKAQEEEGEVGFPVRPQVPLRPMTYKAAFDLSFLLKEXGGLEGLIYSKKRQEILDLWVYHTQGFFPDWQNYTPGPGVRFPLTFGWCFKLVPVDPREVEEANEGEDNCLLHPMSQHGMEDEHGEVLKWKFDSSLARRHLAREKHPEFYKDC

SEQ ID NO: 644 - protein, 209 aa, Artificial
  HIV Nef
MGNKWSKSWPAIRERIRRTNPAAERTRAAEGVGAASRDLDKHGALTSSNTPATNADCAWLEAQEEEEEVGFPVRPQVPVRPMTYKAAFDLSFFLKEKGGLEGLIHSKQRQDILDLWVYNTQGYFPDWQNYTPGPGVRYPLTFGWCFKLVPVDPREVEEANEGENNCLLHPMSQHGMEDADKEVLQWKFDSSLARRHMARELHPEYYKDC

SEQ ID NO: 645 - protein, 208 aa, Artificial
  HIV Nef
MGGKWSKSSVVGWPAIRERMRRTEPAAEGVGAASQDLDKYGALTTSNTATNNADCAWLEAQEEADDVGFPVRPQVPLRPMTYKAAFDLSFFLKEKGGLDGLIYSRKRQEILDLWVYHTQGFFPDWQNYTPGPGTRYPLTFGWCYKLVPVDPREVEEANEGENNCLLHPMSQHGIEDGDREVLMWKFDSHLARRHTARELHPEFYKDCR

SEQ ID NO: 646 - protein, 207 aa, Artificial
  HIV Nef
MGGKWSKSCKIGWPAVRERMRRTEPAVEGVGAASQDLDRHGALTSSNTATNNADCAWLEAQEEGEEVGFPVRPQVPLRPMTYKAAFDLSFFLKEKGGLDGLIHSKKRQDILDLWVYHTQGYFPDWQNYTPGPGVRYPLTFGWCYKLVPVDPGEVEEANKGENNCLLHPMSLHGAEDIHGEVLEWKFDSMLARRHMARELHPEYYKDC

SEQ ID NO: 647 - protein, 214 aa, Artificial
  HIV Nef
MGGKWSKSGKVGWPEVRERMRRTRPAAEGGDSAAEGVGAASRDLARHGALTSSNTATTNAACAWLEAQEEADEVGSPVRPQVPLRPMTYKAAFDLGFFLKEKGGLDGLIYSKKRQEILDLWVYHTQGFFPDWQNYTPGPGVRYPLTFGWCYKLVPVDPGEVEEANEGEDNCLLHPISQHGMEDTEREVLRWKFDSQLARRHMARELHPEYYKDC

SEQ ID NO: 648 - protein, 184 aa, Artificial
  HIV Nef
MGGKWSKSSLVGWPAVRERIRTTAPAATNDACARLKEQEEEGEVGFPVRPQVPVRPMTYKAAFDLSFFLKEKGGLDGLIYSKKRQEILDLWVYNTQGFFSDWQNYTPGPGIRYPLTFGWCYKLVPVDPGEVEEANKGENNCLLHPMSQYGMDDEHKEVLRWKFDSSLARRHLARELHPEYYKDC

SEQ ID NO: 649 - protein, 207 aa, Artificial
  HIV Nef
MGGKWSKSSIVGWPAVRERMRKTEPAAEGVGAASRDLDKYGALTSSNTVTTNAACAWLEAQEKEGGVGFPVRPQVPLRPMTYKAAFDLGFFLKEKGGLEGLIYSKKRQEILDLWVYHTQGYFPDWQNYTPGPGVRYPLTFGWPFKLVPVDPKEVEEANKGENNCLLHPLSQQGMEDEDREVLMWKFDSQLAHRHLAREKHPEWYKDC

SEQ ID NO: 650 - protein, 207 aa, Artificial
  HIV Nef
MGGKWSKSSIVGWPAVRERIRRTEPAAEGVGAASQDLDKHGALTSNNTSSTNDACAWLEAQEEADDVGFPVRPQVPLRPMTYKAAIDLSFFLKEKGGLDGLIYSAKRQEILDLWVYHTQGFFPDWQNYTPGPGVRYPLTFGWCYKLVPVDPREVEEANQGENNCLLHPMSQFGMDDSHKEVLTWKFDSHLARRHMARELHPEYYKDC

SEQ ID NO: 651 - protein, 206 aa, Artificial
  HIV Nef
MGGKWSKSSIIGWPAVRERMRKAEPAAEGVGAASQDLDKHGALTSSNTANNNADCAWLEAQEEEEVGFPVKPQVPLRPMTMKGAVDLSFFLKEKGGLEGLIYSKRRQEILDLWVYHTQGFFPDWQNYTPGPGVRYPLTFGWCFKLVPVDPREVEEANEGENNCLLHPISLHGMEDNHREVLQWKFDSQLARRHIARERHPEYYKDC

SEQ ID NO: 652 - protein, 209 aa, Artificial
  HIV Nef
MGSKWSKSSIVGWPAVRERIRRTRTEPAAEGVGAASQDLDKHGALTPSNTAGNNSTCAWLQAQEEEEEVGFPVRPQVPLRPMTYKAAFDLSFFLKEKGGLDGLIYSKQRQDILDLWVYNTQGFFPDWQNYTPGPGVRYPLTSGWCYKLVPVDPREVEEANEGESNSLLHPISLHGMEDDDREVLKWVFDSSLARRHLAREKHPEFYKDC

SEQ ID NO: 653 - protein, 209 aa, Artificial
  HIV Nef
  misc_feature (200)..(200): Xaa can be any naturally occurring amino acid
MGGKWSKSSIIGWPAIRERIRRTEPAAEGVGAASQDLDKHGALTSSNTATNNADCAWLQAQEEESEGVGFPVRPQVPLRPMTYKAAFDLSFFLKEKGGLEGLIYSKKRQEILDLWVYHTQGFFPDWQNYTPGPGVKYPLTFGWCFKLEPVDPKEVEEANEGDNNCLLHPMSQHGMDDEEREVLQWKFDSLLSRRHLARIXIHAEYYKDC

SEQ ID NO: 654 - protein, 202 aa, Artificial
  HIV Nef
  misc_feature (72)..(72): Xaa can be any naturally occurring amino acid
MGSKWSKCSIIGWPAVRERIRRAEPAAVGVGAASQDLDKYGALTSSNTDTNNAACAWLRAQEEEEEVGFPVXTSGTFKAAFDLSFFLKEKGGLEGLIYSKKRQEILDLWVYHTQGFFPDWQNYTPGPGVRYPLTFGWRYKLVPVDPQEVQQSNEGDNNCLLHPMSQHGIEDEHGEVLMWKFDSHLAYRHMAREKHPEFYKDC

SEQ ID NO: 655 - protein, 219 aa, Artificial
  HIV Nef
MGSKWSKCSGWPDVRERMRRATPAAEAGRAAPAAEGAAPGVGAASRDLDRHGALTSSNTPTNNADCAWLQAQEEEEEEVGFPVRPQVPLRPMTYKAAFDLSFFLKEKGGLEGLIYSRKRQEILDLWVYHTQGYFPDWQNYTPGPGIRYPLTFGWCFKLVPVDPREVEEANEGENNCLLHPRSLHGIEDEEREVLKWKFDSSLARRHMARELHPEYYKAC

SEQ ID NO: 656 - protein, 223 aa, Artificial
  HIV Nef
MGSKWSKCSIVGWPDVRERMRRARPAVRERRRQTEPAAEGVAAEGVGTASQDLAKHGALTSSNTPANNAACAWLQAQEEEEDVGFPVRPQVPLRPMTYKGAFDLSFFLKEKGGLEGLIYSKKRQDILDLWVYNTQGYFPDWQSYTPGPGIRYPLTFGWCFKLVPVDPREVEENTEGENTCLLHPMSQHGMEDEEGEVLQWKFDSLLAYRHMAREQHPEYYKDC

SEQ ID NO: 657 - protein, 207 aa, Artificial
  HIV Nef
MGGKWSKGRIVGWPAVRERMRRTEPAAEGVGAASRDLDKHGALTSSNTAENNADCAWLEAQEETEEVGFPVRPQVPLRPMTYKGAVDLSFFLKEKGGLDGLIYSQKRQDILDLWVHHTQGYFPDWQNYTPGPGVRYPLTFGWCYKLVPVDPREVEEANQGENNCLLHPMSQHGVDDPDREVPMWKFDSLLAHRHMARELHPGYYKDC

SEQ ID NO: 658 - protein, 208 aa, Artificial
  HIV Nef
MGSKWSKRSIVEWPAVRERLRKTEPAAEGVGAASQDLDKHGALTSSNTAQNNAACAWLEAQEEAEGEVGFPVRPQVPLRPMTYKGAFDLGFFLKEKGGLEGLIYSKKRQEILDLWVYHTQGYFPDWQNYTPGPGVRYPLTFGWPFKLVPVDPREVEEDNNGENNCLLHPMSQHGMDDEDREVLMWKFDSHLVHRHMARELHPEYYKGC

SEQ ID NO: 659 - protein, 207 aa, Artificial
  HIV Nef
MGGKWSKSSIVGWPAVRERIRQTGARAAEGVGAASQDLDRHGALTSSNTGATNSDVAWLEAQEEEGEVGFPVRPQVPLGPMTYKGAVDLSFFLKEKGGLERLIYSKKRQEILDLWVYHTQGYFPDWQNYTPGPGTRFPLTFGWCFMLVPVDPREVEEANEGENSCLLHPISQHGMEDEDREVLRWKFDSLARRHIARELHPEYYKNC

SEQ ID NO: 660 - protein, 207 aa, Artificial
  HIV Nef
MGGKWSKSSIVGWSAVRERMKRTEPAAEGVGAASQDLDKHGALTSSNTPANNADCAWLETQEEADEVGFPVRPQVPLRPMTYKGAFDLGFFLKEKGGLEGLIYSKKRQEILDLWVYHTQGYFPDWQNYTPGPGVRYPLTFGWPFKLVPVDPREVEEANQGENNCLLHPMSQYGMEDEEREVLKWKFDSQLAYRHMAREIHPEYYKDC

SEQ ID NO: 661 - protein, 208 aa, Artificial
  HIV Nef
  misc_feature (94)..(94): Xaa can be any naturally occurring amino acid
MGGKWSKSSIVGWPTVRERMRRTQPAAEGVGAASQDLDKYGALTSSNTADTNADCAWLQAQEEEGEVGFPVRPQVPLRPMTYKGAVDLSFFLKXEKGGLEGLIYSKKRQEILDLWVYHIQGYFPDWQNYTPGPGVRYPLTFGWCFKLVPVDPREVEEANEGENNCLLHPISQHGMEDEDREVLRWKFDSHLARRHMARELHPEWYKDC

SEQ ID NO: 662 - protein, 213 aa, Artificial
  HIV Nef
MGSKWSKRSTAGWPAVRERMRRTQPAAEGTQSAAEGVGAASQDLDKHGALTSSNTAATNADCAWLEAQEEDGDVGFPVRPQVPLRPMTYKGAFNLGFFLKEKGGLDGLIYSKKRQEILDLWVYHTQGFFPDWQNYTPGPGVRYPLTFGWCFKLVPVDPREIEEANKGEDNCLLHPMSQHGMEDEDREVLKWQFDISLARRHMARELHPEWYKD

SEQ ID NO: 663 - protein, 207 aa, Artificial
  HIV Nef
MGGKWSKSSLVGWPEVRDRIRRTDPAAEGVGAASQDLDKHGALTNSNTAATNKDCAWLEAQEEEGEVGFPVRPQVPLRPMTYKGAFDLGWFLKEKGGLDGLIYSKKRQEILDLWVYHTQGYFPDWQNYTPGPGVRYPLTFGWCYKLVPVDPKEVEEATEGENNCLLHPICQHGMEDEDREVLRWKFDSELARRHIARERHPEFYKDC

SEQ ID NO: 664 - protein, 207 aa, Artificial
  HIV Nef
MGGKWSKSSIVGWPAVRERIRRTEPAAEGVGAASQDLDKYGALTTSNTDPNNAACAWLRAQEEEGEVGFPVRPQVPLRPMTYKGAFDLGFFLKEKGGLEGLIYSKKRQEILDLWVYNTQGVFPDWQNYTPGPGVRYPLTFGWCFKLVPVDPREVEEASEGEDNCLLHPMSQHGMEDEHREVLKWKFDSQLARRHMARELHPEYYKDC

SEQ ID NO: 665 - protein, 207 aa, Artificial
  HIV Nef
MGGKWSKSSIVGWPAVRERMRRAEPAAEGVGTASRDLDKYGALTTNNTPTNNAACAWLEPQKEEEEVGFPVRPQVPLRPMTYKAAVDLSFFLKEKGGLGGIIYSNKRQDILDLWVYNTQGYFPDWQNYTPGPGVRYPLTFGWCYKLVPVDPREVEEANEGENNRLLHPMSLHGMEDDDREVLRWKFDSSLAHRHMARELHPEYYKDC

SEQ ID NO: 666 - protein, 213 aa, Artificial
  HIV Nef
MGGKWSKCSGWPAVRERMRRTRPAVEGRTESAAEGVGAASQDLDKYGALTSSNTSTNNADCAWLEAQEEEGDVGFPVRPQVPLRPMTYKGAFDLGFFLKEKGGLEGLVYSKKRQEILDLWVYHTQGFFPDWQNYTPGPGVKYPLTFGWCFKLVPVDPGEVEEANKGEDNCLLHPMSQHGMEDEHGEVLKWKFDSQLARRHMARELYPEYYKDC

SEQ ID NO: 667 - protein, 207 aa, Artificial
  HIV Nef
MGGKWSKSSIVGWPAVRERIRRTDPPAEGVRAPSQDLDKHGALTSSNTPANNADVAWLEPQEEEGAVGFPLRPQVPLKPMTYKGAVDLGFFLKEKGGLEGLIYSKKRQEILDLWVYHTQGYFPDWQNYTPGPGITYPLTFGWPFKLVPVDPREVEEANNGENNCLLHPMSQHGMDDEEREVLTWKFDSHLVHRPMAREIHPEYYKDC

SEQ ID NO: 668 - protein, 213 aa, Artificial
  HIV Nef
MGGKWSKSSIIGWPAIRERIRRTEPAAERVGAAAEGVGAASQDLDKHGALTSSNTAANNADCAWLEAQEEEEVGFPVRPQVPLRPMTYKAAFDLSFFLKEKGGLEGLIYSRKRQEILDLWVYHTQGFFPDWHNYTPGPGVRYPLTFGWCFKLVPVDPGEVEEANEGENNCLLHPMAQHGMEDEHKEVLKWKFDSQLARRHLARELHPEFYKDC

SEQ ID NO: 669 - protein, 207 aa, Artificial
  HIV Nef
MGNKWSKGWPAVRDRIRRTEPATEPAAEGVGSASKDLEKHGALTTSNTAANNPHCAWLEAQEEEEEVGFPVRPQVPLRPMTYKGAFDLSFFLKEKGGLDGLIYSKKRQEILDLWVYNTQGYFPDWQCYTPGPGVRYPLTFGWCFKLVPVDPGEVEEANGGEDNCLLHPMSQHGIEDADREVLKWKFDSSLARRHLTREKHPEYYKDC

SEQ ID NO: 670 - protein, 207 aa, Artificial
  HIV Nef
MGGKWSKSSIVGWPAVRERIRRTEPAAEGVGAASQDLDKYGAFTSSNTASNNADCAWLEAQEEADEVGFPVRPQVPLRPMTYKGAVDLSFFLKEKGGLDGLIYSPKRQEILDLWVYHTQGFFPDWHNYTPGPGVRYPLTFGWCYKLVPVDPREVEENNQGENHCLLHPMSQHGMDNPDKEVLMWKFDSHLARRHMARELHPEYYKDC

SEQ ID NO: 671 - protein, 194 aa, Artificial
  HIV Nef
MGGKWSKWPAVRERMRRTRVGAEYQDLDKDRALTSSNTDTNNAACAQQEEEEEVGFPVRPQVPLRPMTYKEAFDLSFFLKEKGGLDGLIYSKKRQDILDLWVYNTQGFLPDWQNYTPGPGVRFPLTFGWCFKLVPVDPREVEEETEGDNNCLLHPMNQHGMDDPERGVLKWKFDSHLARRHMARELHPEYYKDC

SEQ ID NO: 672 - protein, 215 aa, Artificial
  HIV Nef
  misc_feature (3)..(3): Xaa can be any naturally occurring amino acid
MGXKWSKRSIVGWPNVRERIRRTNPLTEREAERAAVGVGAASQDLDKHGALTSSNTPANNADCAWLQAQEEDEEVGFPVRPQVPLRPMTYKAAFDLSFFLKEKGGLDGLIYSKKRQEILDLWVYHTQGFFPDWQNYTPGPGVRYPLTFGWCYKLVPVDPREVEEDNEGENNCLLHPMSQHGMEDADREVLKWVFDSHLARKHMARELHPEYYKNC

SEQ ID NO: 673 - protein, 211 aa, Artificial
  HIV Nef
MGSKWSKSSIIGWPAVRERIRKTEPRKTEPAAEGVGAVSQDLDQHGAITSSNTATNADCACLEAQEEEAELGFPVRPQMPLKPVTYKAAFDLSFFLKKKGGLEGLIYSKKRQNILDLWVYHTQGFFPDWHNYTPGPGIRYPLTFGWCFKLVPVDPREVEEANKGENTSLLHPVSLHGMEDEHREVLKWKFDSSLARRHMARELHPEFYKDC

SEQ ID NO: 674 - protein, 208 aa, Artificial
  HIV Nef
MGGKWSKSSIVGWPAVRERMRRTRPGAAEGVGAASQDLDKYGALTSSNTASNNADCAWLEAQEEANEVGFPVRPQVPLRPMTQKGAFDLGFFLKEKGGLDGLIYSRKRQEILDLWVYHTQGYFPDWQNYTSGPGVRYPLTFGWCYKLLPVDPKEVEEASEGENNCLLHPMNQHGMEDEHGEVLMWKFDSQLARRHMARELHPEYYKDC

SEQ ID NO: 675 - protein, 207 aa, Artificial
  HIV Nef
MGSKWSKSSIIGWPAVRERMRRTEPAAEGVGAASQDLDKYGAMTTSNTAHNNGDCAWLQAQEEEEEVGFPVRPQVPLRPMTFKGALDLGFFLKEKGGLDGLIHSKRRQDILDLWVYHTQGYFPDWQNYTPGPGVRYPLTFGWPFKLVPVDPKEVEEANKGENNCLLHPMSLHGIEDAEREVLKWQFDSSLARRHMARELHPEYYKDC

SEQ ID NO: 676 - protein, 207 aa, Artificial
  HIV Nef
MGGKWSKSSIIGWPAVRERMRRTEPAAEGVGAASQDLDKHGALTSSNTATTNADCAWLEAQAEAEKVGFPVRPQVPLRPMTYKGAVDLSFFLKEKGGLDGLIYSKQRQDILDLWVYNTQGYFPDWQNYTPGPGVRYPLTFGWCYKLVPVDPREVEEANEGENNCLLHPMSLHGIEDAGKEVLIWKFDSHLARRHMARELHPEFYKDC

SEQ ID NO: 677 - protein, 209 aa, Artificial
  HIV Nef
MGGKWSKSSLVGWPDVRERIRKPRPKPAAEGVGAASQDLDKYGALTSSNTATNNAACAWLEAQEEAGEVGFPVKPQVPLRPMTYKAAFDLGFFLKEKGGLEGLIYSKKRQEILDLWVYHTQGFFPDWQNYTPGPGTRYPLTFGWPFKLVPVDPREVEEANNGENNCLLHPMSQHGMDDEDREVLMWKFDSQLARRHIAREIHPEYYKDC

SEQ ID NO: 678 - protein, 208 aa, Artificial
  HIV Nef
MGSKLSKSKIVGWPAIRERLRRTEPAAEGVGAASQDLDKHGALTTSNTASNNAACAWLQAQEEDNGDVGFPVRPQVPLRPMTYKAAFDLGFFLKEKGGLDGLIYSKKRQDILDLWVYNTQGFFPDWQNYTPGPGVRYPLTFGWCYKLVPVDPREVEEANEGEDNCLLHPMSQHGIEDPEKEVLKWVFDSSLARRHVARELHPEFYKDC

SEQ ID NO: 679 - protein, 216 aa, Artificial
  HIV Nef
MGGKWSKSSIVGWPAVRERIRQTDPRERIRQTEPAAEGVGAASRDLERHGAITTSNTAANNPACAWLEAQEEDGDVGFPVRPQVPLRPMTYKAAFDLSFFLKEKGGLDGLIYSKKRQDILDLWVYNTQGFFPDWQNYTPGPGVRYPLTFGWCYKLVPVDPREVEEANEGEDNCLLHPMSQHGMEDADREVLRWKFDSSLARRHMARELHPEYYKDC

SEQ ID NO: 680 - protein, 212 aa, Artificial
  HIV Nef
MGGKWSKSSIVGWPAVRERIRRTEPRRAEPAAEGVGAASQDLDKHGALTTSNTASNNADCAWLEAQEEEEEVGFPVKPQVPVRPITYKAAFDLSFFLKEKGGLEGLIYSKKRQEILDLWVYNTQGYFPDWQNYTPGPGTRYPITFGWCFKLVPVDPREVEEANEGENNSLLHPVSLHGMEDEDREVLKWEFDIRLAHTHMARQLHPEFYKNC

SEQ ID NO: 681 - protein, 207 aa, Artificial
  HIV Nef
MGGKWSKSSIVGWPEVRERLRRTAPAAEGVGAASQDLAKHGAITSSNTATTNADCAWLEAQEEGEEVGFPVRPQVPLRPMTYKGAFDLGFFLKEKGGLDGLIHSKKRQDILDLWVYHTQGYFPDWQNYTPGPGVRYPLTFGWCFKLVPVDPREVEEATEGEDNCLLHPLSQHGIEDADREVLKWQFDSSLAHRHVARELHPEYYKDC

SEQ ID NO: 682 - protein, 205 aa, Artificial
  HIV Nef
MGGKWSKRKIVQWPTVRERLRRTEPAEGVGAASQDLANHGALTTSNTATNNADCAWLQAQEEEEVGFPVRPQVPLRPMTYKAAFDLSFFLKEKGGLEGLIYSKQRQDILDLWVYNTQGFFPDWHNYTPGPGVRYPLTFGWCFKLVPVDPREVEENNQRENSCLLHPMSQHGMEDPDREVLKWKFDSMLARRHMARELHPEFYKDC

SEQ ID NO: 683 - protein, 204 aa, Artificial
  HIV Nef
  misc_feature (75)..(75): Xaa can be any naturally occurring amino acid
MGGKWSKSSIVGWPAVRERIRRTQPAAEGVGAASQDLDRHGAITSSNTAATNADCAWLEAQEEADEVGFPVRPQXPMTYKAAFDLSFFLKEKGGLDGLIYSRKRQDILDLWVYHTQGFFPDWQNYTPGPGVRYPLTFGWCFKLVPVDPREVEEANEGENNCLLHPMSQHGMEDADREVLIWKYDSQLARRHMARELHPDYYKDC

SEQ ID NO: 684 - protein, 207 aa, Artificial
  HIV Nef
MGSKLSKSCTAGWPTVRERIRQAEPAAEGVGAASKDLDKHGALTSSNTAGTNADCAWLQAQEEEGEVGFPVRPQVPLRPMTYKSAFDLSFFLKEKGGLEGLIYSKKRQEILDLWVYHTQGFFPDWQNYTPGPGVRYPLTFGWCLKLVPVDPREVEEDNEGENNCLLHPMSQHGMEDADREVLRWKFDSHLARRHMARELHPEFYKDC

SEQ ID NO: 685 - protein, 207 aa, Artificial
  HIV Nef
MGGKWSKSSIVGWANVRERMRRTEPAAVGVGAASQDLDKYGALTSSNTAATNADCARLEAQEETEEVGFPVRPQVPLRPMTYKAAFDLSFFLKEKGGLDGLIHSKKRQEILDLWVHHTQGFFPDWQNYTPGPGIRYPLTFGWCFKLVPVDPREVQEANEGDDNCLLHPMSQFGMDDDHKEVLKWKFDSHLARRHMARELHPEFYKDC

SEQ ID NO: 686 - protein, 212 aa, Artificial
  HIV Nef
  misc_feature (100)..(100): Xaa can be any naturally occurring amino acid
MGNKWSKSWPAVRERIRRTEPAVRVRRTEPAAEGVGAASKDLEKHGALTTSNTVHNNPDCAWLEAQEEEEEVGFPVRPQVPLRPMTYKAAVDLSWFLKEXGGLDGLIHSQKRQEILDLWVYYTQGYFPDWQNYTPGPGIRYPLTFGWCFRLVPVDPSEVEEANQGENNCLLHPISQHGMEDEDREVLKWQFDSSLARRHMARELHPEYYKDC

SEQ ID NO: 687 - protein, 216 aa, Artificial
  HIV Nef
MGGKWSKRTIVGWPEIRERMRRTPPAAEGVRPTPPAAEGVGAVSQDLARHGAVTSSNTAANNPDCAWLEAQEEEEVGFPVRPQVPLRAMTYKGAVDLSHFLKEKGGLDGLIYSQRRQDILDLWVYNTQGYFPDWQNYTPGPGARFPLTFGWCFKLVPVDPSEVEEATEGENNSLLHPICQHGAEDPEREVLKWKFDSRLALRHLAREQHPEFYKDC

SEQ ID NO: 688 - protein, 217 aa, Artificial
  HIV Nef
MGGKWSKRSIPGWPAIRERMRRTPPTAQRTEAVSPAAPGVGAVSQDLATHGAVTSSNTAATNPDCAWVEAQEEESEVGFPVRPQVPLRPMTFKGAFDLSFFLKEKGGLDGLIYSQKRQDILDMWVYHTQGYFPDWQNYTPGPGIRYPLTFGWCFKLVPVEPSEVEEATQGENNSLLHPICQHGVDDPEREVLRWEFDRSLARRHRARELHPEYYKDC

SEQ ID NO: 689 - protein, 216 aa, Artificial
  HIV Nef
MGGKWSKRSLPGWPAIRERMRRTPPAAERTPPAAAAEGVGAVSQDLATRGAVTINNTAATNADSAWLEAQEEEEEVGFPVRPQVPLRPMTYKGAFDLSHFLREKGGLDGLIHSQKRQDILDLWVYHTQGFFPDWQGYTPGPGIRYPLTFGWCFKLVPVSPAEVEEATEGETNSLLHPICQHGIEDPEREVLKWVFDSHLALVHKARELHPEFYKDC

SEQ ID NO: 690 - protein, 207 aa, Artificial
  HIV Nef
MGSKWSKSSIVGWPAVRARIRQTPPAAEGVGAVSQDLARHGAITSSNTAANNPDCAWLEAQQEDSEVGFPVRPQVPLRPMTYKSAFDLSFFLKEKGGLDGLIYSKQRQDILDLWVYNTQGFFPDWQNYTPGPGVRYPLTFGWCFKLVPMDPAEVEEANKEENSSLLHPICQHGMEDDDKQVLGWRFDSSLARRHIAREKHPEYYKDC

SEQ ID NO: 691 - protein, 207 aa, Artificial
  HIV Nef
  misc_feature (1)..(2): Xaa can be any naturally occurring amino acid
  misc_feature (11)..(12): Xaa can be any naturally occurring amino acid
  misc_feature (17)..(17): Xaa can be any naturally occurring amino acid
  misc_feature (30)..(30): Xaa can be any naturally occurring amino acid
  misc_feature (38)..(38): Xaa can be any naturally occurring amino acid
  misc_feature (58)..(58): Xaa can be any naturally occurring amino acid
  misc_feature (63)..(63): Xaa can be any naturally occurring amino acid
  misc_feature (65)..(65): Xaa can be any naturally occurring amino acid
  misc_feature (82)..(86): Xaa can be any naturally occurring amino acid
  misc_feature (88)..(88): Xaa can be any naturally occurring amino acid
  misc_feature (92)..(92): Xaa can be any naturally occurring amino acid
  misc_feature (101)..(101): Xaa can be any naturally occurring amino acid
  misc_feature (109)..(109): Xaa can be any naturally occurring amino acid
  misc_feature (114)..(114): Xaa can be any naturally occurring amino acid
  misc_feature (133)..(133): Xaa can be any naturally occurring amino acid
  misc_feature (141)..(142): Xaa can be any naturally occurring amino acid
  misc_feature (159)..(159): Xaa can be any naturally occurring amino acid
XXGKWSKSSIXXWPQVXERIRRAPAPAARXVGPVSQDXDKHGAVTSSNTAANNADCAXLEAQXEXEVGFPVRPQVPLRPMTXXXXXDXSHFXKEKGGLDGXIYSKKRQXILDLXVYHTQGYFPDWQNYTPGPXIRFPLTFXXCYKLVPVDPAEVEEATXGENNSLLHPICQHGMDDEEKEVLMWKFDSRLALKHRARELHPEFYKDC

SEQ ID NO: 692 - protein, 204 aa, Artificial
  HIV Nef
MGGKWSKSSIVGWPEIRERMRRAPPAAPGVGAVSQDLDKHGAVTSKNINHPSYAWLEAQEDEDVGFPVRPQVPLRPMTYKGAVDLSHFLKKKGGLDGLVYSRKRQEILDLWVYHTQGYFPDWQNYTPGPGTRFPLTFGWCFKLVPVDPDEVEKATEGENNSLLHPICQHGMDDEEREVLKWKFDSRLALKHRARELHPEWYKDC

SEQ ID NO: 693 - protein, 205 aa, Artificial
  HIV Nef
MGGKWSKSSIVGWPEIRERMRRAPSAAAPGVGAVSQDLAKHGAVTSSNINNPSCVWLEAQEEEEVGFPVRPQVPLRPMTYKAAVDLSHFLKEKGGLDGLIYSRKRQEILDLWVHHIQGFFPDWQNYTPGPGIRFPLTFGWCFKLVPVDPDEVEKDTEGENNSLLHPICQHGMDDEEKEVLKWKFDSRLALKHLACEKHPEFYKDC

SEQ ID NO: 694 - protein, 204 aa, Artificial
  HIV Nef
MGSKWSKSSIVGWREVRERLRQTLAAARGVGAVSQDLEKYGAVTSSNVNHPSCAWLEAQEEEEVGFPVRPHVPLRPMTYKGALDLSHFLKEKGGLDGLIYSRRRQEILDLWVYNTQGYFPDWQNYTPGPGVRYPLTFGWCFKLVPVDPDEVEQANEGENNSLLHPMCQHGMDDEEKETLRWRFDSRLALRHRAQEMHPEFYKDC

SEQ ID NO: 695 - protein, 204 aa, Artificial
  HIV Nef
MGGRWSKSRIVGWPEVRERIRRAPPAATGVGAVSQDLDKYGAITSSNINHPSCVWLEAQEDEGVGFPVRPQVPLRPMTYKGALDLSHFLKEKGGLDGLVYSKKRQEILDLWVHHTQGYFPDWQNYTPGPGIRYPLTFGWCFKLVPVDPDEVKKDTEGENNSLLHPMCQHGMDDEEREVLKWKFDSRLALKHRAQELHPEFYKDC

SEQ ID NO: 696 - protein, 204 aa, Artificial
  HIV Nef
  misc_feature (117)..(117): Xaa can be any naturally occurring amino acid
MGGKWSKRSKEGWSEVREKIRQTPPAAKGVGAVSQDLDRHGAITSSNINHPSCTWLEAQEDEEVGFPVKPQVPLRPMTYKGAFDLSHFLKEKGGLDGLIYSRKRQEILDLWVYNTQXYFPDWQNYTPGPGVRYPLTFGWCFKLVPVEPEEVEKANEGENNSLLHPICQHGMDDEERETLMWKFDSKLALKHRAHELHPEYFKNC

SEQ ID NO: 697 - protein, 204 aa, Artificial
  HIV Nef
MGGKWSKSSIVGWPKVRERMARTPPAAKGVGAVSQDLDKHGAVTSSNINHPSCAWVEAQEEEEVGFPVRPQVPLRPMTYKGAVDLSHFLKEKGGLDGLIYSRRRQEILDLWVYNTQGYFPDWQNYTPGPGTRFPLTFGWCFKLVPVDPDEVEKATEGENNSLLHPICQHGMDDEERETLMWKFDSRLALTHRARELHPEFYKDC

SEQ ID NO: 698 - protein, 209 aa, Artificial
  HIV Nef
MGNKWSKGWPEVRERIRQARAPAHTPAPTAATGVGAVSQDLEKHGAITSSNINHPSCTWLEAQAQEDEEVGFPVRPQVPLRPMTYKGALDLSHFLKEKGGLEGLIYSRKRQEILDLWVYHTQGYFPDWHNYTPGPGIRYPLTFGWCFKLVPVDPDEVEKATEGENNSLLHPMCQHGMDDEERETLMWKFDPHLAFKHRAFELHPEYYKN

SEQ ID NO: 699 - protein, 215 aa, Artificial
  HIV Nef
MGNKWSKSCIVGWPEVRERIRQTPTAARERTRQAPTAAKGVGAVSQDLDKHGAVTSSNVNHPSCVWLEAQEEEEVGFPVRPQVPLRPMTYKAAFDLGFFLKEKGGLDGLIYSKKRQEILDLWVYHTQGYFPDWQNYTPGPGIRYPLTFGWCFKLVPVDEDEVEEATGGENNSLLHPICQHGMDDEEKETLRWKFDSSLARVHKARELHPEFYKDC

SEQ ID NO: 700 - protein, 205 aa, Artificial
  HIV Nef
MGGKWSKKSRVEWPEVRKRMRETPAAAKGVGAVSQDLDKYGAVTSSNTSSTNASCAWLEAQEEGDVGFPVRPQVPLRPMTYKAAFDLSFFLKEKGGLDGLIHSQKRQEILDLWVYHTQGFFPDWQNYTPGPGIRYPLTFGWCYKLVPVDPAEVEEATGGENNSLLHPICQHGVDDEEKEVLMWKFDSTLALKHRAYELHPEFYKD

SEQ ID NO: 701 - protein, 204 aa, Artificial
  HIV Nef
MGGKWPKSSVVGWPEVRERIRRTPAAAPGVGAVSQDLDKHGAVTSSNVNHPSCVWLDAQEEEEVGFPVRPQVPLRPMTYKGALDLSFFLKEKGGLDGLIYSRKRQEILDLWVYHTQGFFPDWHNYTPGPGVRYPLTFGWCFKLVPVDPREVEEATGGEDNCLLHPVCQHGMEDEYGEVLQWKFDSHLAYKHQARERHPEFYKDC

SEQ ID NO: 702 - protein, 207 aa, Artificial
  HIV Nef
MGSKWSKCSPVGWPAVRERLRQTEPAAEGVGAASQDLDKYGALTSSNTPSNNADCAWLAAQEEENEVGFPVRPQVPLRPMTYKAAVDLSFFLKEKGGLEGLIYSKKRQDILDLWVYNTQGYFPDWQNYTPGPGVRYPLTFGWCYKLVPVDPREVEEANEGEDNCLLHPLSQHGMEDEDREVLKWKFDSHLAHRHMARELHPEYYKDC

SEQ ID NO: 703 - protein, 205 aa, Artificial
  HIV Nef
MGGKWSKSSIIGWPQIRERIRRTPPAATGVGAVSQDLDKHGAITSSNINHPSNTWLAAQEEEEEVGFPVRPQVPLRPMTYKGALDLSHFLKEKGGLDGLIYSQQRQDILDLWVYNTQGYFPDWQNYTPGPGIRYPLTFGWCFKLVPVNPDEVEEATKGENNSLLHPMCQHGMDDKERETLVWRFDSRLALKHLAREKHPEFYKDC

SEQ ID NO: 704 - protein, 207 aa, Artificial
  HIV Nef
MGGKWLKSSIVGWPAVRERIRRTEPAAEGVGAASQDLDKYGALTSSNTVTNNPDCAWLEAQKEEEEVGFPVRPQVPLRPMTYKAAVDLSFFLKEKGGPEGLIYSKKRQDILDLWVYNTQGFFPDWQNYTPGPGTRYPLTFGWCFKLVPVDPREVEEANEGENNCLLHPMSQHGIEDEDKEVLRWKFDSQLARRHMAREMHPEYYKDC

SEQ ID NO: 705 - protein, 213 aa, Artificial
  HIV Nef
MGGKWSKRSKVEWPQVRERMRQTPIAAEAEGAAAEGVGAVSQDLARHGAVTSRNTSATNADCAWLEAQEDEEVGFPVRPQVPLRPMTFKGALDLSHFLKEKGGLDGLIYSRKRQEILDLWVYHTQGYFPDWQNYTPGPGTRFPLTFGWCFKLVPMDPTEVEEANEGENNCLLHPISQHGMEDEDREVLVWRFDSRLALKHIAKEKHPEYFKDC

SEQ ID NO: 706 - protein, 206 aa, Artificial
  HIV Nef
MGGKWSKSSIVGWPAVRERIKRTDPAAEGVGAASRDLGKHGAITSSNTAQTNPDCAWLEAQEEDGEVGFPVRPQVPLRPMTYKGAVDLSHFLKEKGGLEGLVWSPKRQEILDLWVYHTQGYFPDWQNYTPGPGIRYPLIFGWCFELVPVDPKEVEEDIGENSSLLHPMHQHGMEDTEREVLMWRFNSRLAFEHKAHQLHPEYYKDC

SEQ ID NO: 707 - protein, 206 aa, Artificial
  HIV Nef
MGGKWSKSSIVGWPEVRERMRRARAPSAAPGVGAVSQDLDKHGAITSSNINHPSCVWLEAQEDEDVGFPVRPQVPLRPMTYKAAVDLSHFLKEKGGLDGLIYSRKRADILDLWVYHTQGFFPDWQCYTPGPGTRFPLTFGWCFKLVPVDPDEVEKATEGETNTLLHPICQHGMDDEEKEVLKWQFDSRLALKHLAREKHPEFYKDC

SEQ ID NO: 708 - protein, 206 aa, Artificial
  HIV Nef
  misc_feature (44)..(44): Xaa can be any naturally occurring amino acid
  misc_feature (178)..(178): Xaa can be any naturally occurring amino acid
MGGKWSKSSIVGWPAIRERMRRAEPAAEGVGAASRDLDRRGAIXINNLPSNNSDSAWLEAQEEEEVGFPVRPQVPLRPMTYKAAVDLSHFLKEKGGLDGLIYSKKRQEILDLWVHNTQGFFPDWQNYTPGPGERFPLTFGWCFKLVPVDPQEVEKANDGENNCLLHPMCQHGMEDEEXEVLMWRFDSRLAFKHRARELHPEFYKDC

SEQ ID NO: 709 - protein, 209 aa, Artificial
  HIV Nef
MGGKWSKSSIVGWPKIRERIRRTPPTETGVGAVSQDAVSQDLDKCGAAASSSPAANNASCEPPEEEEEVGFPVRPQVPLRPMTYKGAFDLSHFLKEKGGLDGLVWSPKRQEILDLWVYHTQGYFPDWQNYTPGPGIRFPLTFGWCFKLVPMSPEEVEEANEGENNCLLHPISQHGMEDAEREVLKWKFDSSLALRHRAREQHPEYYKDC

SEQ ID NO: 710 - protein, 212 aa, Artificial
  HIV Nef
MGGKWSKSSPVGWSRVRERMRRTPPAAEGAAAEGVGAVSRDLAKHGAITSSNTVATNADCAWLEAQKEGEEVGFPVRPQVPLRPMTYKAALDLSHFLKEKGGLEGLIYSQQRQDILDLWVYNTQGYFPDWQNYIPGPGTRFPLTFGWCFKLVPMDPAGIEKANEGENNSLLHPICQHGMGDTEREVLVWKFDSMLAFKHRARELHPEYYKDC

SEQ ID NO: 711 - protein, 206 aa, Artificial
  HIV Nef
IGGKWSKSSIVGWPAVRERIRQTPPAEGVGAAPQDLARHGAITSSNTAQTNPDCAWLEAQQENSEVGFPVRQQVPLRPMTYKAAFDLSFFLKEKGGLDGLIYSKKRQDILDLWVYNTQGYFPDWQNYTPGPGTRFPLTFRWCFKLVPMDPAEIEEANKGENNSLLHPICQHGLEDADREVLVWRFDSSLARRHIAREQHPEYYKDC

SEQ ID NO: 712 - protein, 206 aa, Artificial
  HIV Nef
MGGEWSRSSIVGWSTIRERMRRAEPAAAGVGAVSQDLDKRGAITTNNTVKTNADCAWLEAQEDEEVGFPVRPQLPLRPMTFKGAFDLGFFLKEKGGLDGLIHSQKRQDILDLWVYHTQGYFPDWQNYTPGPGIRYPLCFGWCYKLVPVDPKEVEEATEGENNCLLHPICQQGMDDGEREVLMWKFDSSLAREHVARKLYPEFFKDC

SEQ ID NO: 713 - protein, 205 aa, Artificial
  HIV Nef
MGNKWSKGWPAVRERIRQTPPAPPAAEGVGAASQDLAKHGAISSSNTATNNPDCAWLEAQEESEEVGFPVRPQVPLRPMTFKGAFDLSFFLKEKGGLDGLIYSKKRQEILDLWVYHTQGFFPDWHNYTPGPGTRYPLCFGWCFKLVPVDPREVEEANTGENNCLLHPMSQHGMDDDEREVLMWKFDSSLARKHLAREMHPEFYKD

SEQ ID NO: 714 - protein, 209 aa, Artificial
  HIV Nef
MGSNWSKSSIIGWPQVRERMKRAPAPAAEGVGAVSRDLDKHGAITSSNTPTTNADCAWLEAQTEAEDEVGFPVKPQVPLRPMTYKGAFDLSFFLKEKGGLDGLIYSKKRQEILDLWVYNTQGFFPDWQNYTPGPGTRFPLTFGWCYKLVPVDPKEVEEANEGENNCLLHPLCQHGMEDEDREVLMWKFDSSLARRHLAREKHPEFYKDC

SEQ ID NO: 715 - protein, 203 aa, Artificial
  HIV Nef
MGGKGSKRIRSEWPTVRERIIQAEPAAAGVGAASRDLEKHGAITSSNINNADCVWLQAQEEEEVGFPVRPQVPLRPMTFKAAHDLSFFLKEQGGLEGLIYSQRRQDILDLWIYHTQGYFPDWQNYTPGPGTRYPLTFGWCFKLVPVEPDQVEKANEGENISLLHPMSLHGMEDKEKEVLMWKFDSRLAVHHMARELHPEYYKN

SEQ ID NO: 716 - protein, 206 aa, Artificial
  HIV Nef
MGGKWSKHSMFGWPSVRERMKRAEPAADGVGAVSRDLEKHGAITSSNTAATNAACAWLEAQEEEEVGFPVRPQVPLRPMTYKGALDLSHFLREKGGLEGLIYSQRRQDILDLWVYHTQGYFPDWQNYTPGPGTRFPLTFGWCFKLVPVDPEQVEEANEGENNCLLHPMSQHGADDPEREVLMWKFDSRLAIHHMAREMHPEYHKDC

SEQ ID NO: 717 - protein, 205 aa, Artificial
  HIV Nef
MGGKWSKSSVVGWPAIRERMKRAEPAAEGVGAVSRDLEKHGAITSSNTPATNAACAWLEAQEEEEVGFPVKPQVPLRPMTYKAAVDLSHFLKEKGGLEGLVHSQKRQDILDLWVYHTQGYFPDWQNYTPGPGTRFPLTFGWCFKLVPVKPEQVEEANEGENNSLLHPMSLHGMDDPEREVLVWRFDSRLAFKHMARELHPEYYKN

SEQ ID NO: 718 - protein, 200 aa, Artificial
  HIV Nef
MGGKWSKCSGWPTVRERMKQAEPEPAADGVGAASRDLKKHGAITSSNTATNNAACAWLEAQEEEEEGFPVRPQVPLRPMTYKGALDLSHFLKEKGGLEGLIYSPKRQEILDLWVYHTQGYFPDWQNYTPGPGVRYPLTFGWCFKLVPVEPDEEENSSLLHPASLHGTEDTEREVLKWKFDSHLAFHHKARELHPEYYKDC

SEQ ID NO: 719 - protein, 205 aa, Artificial
  HIV Nef
MGGKWSKSSVIGWPTVRERMRRAEPAADRVGAASRDLEKHGAITSSNTAATNAACAWLEAQEEEEVGFPVTPQVPLRPMTYKAAVDLSHFLKEKGGLEGLIHSQRRQDILDLWIYHTQGYFPDQNYTPGPGVRYPLTFGWCYKLVPVEPDKIEEANKGENTSLLHPVSLHGMDDPEREVLEWRFDSRLAFHHVARELHPEYFKNC

SEQ ID NO: 720 - protein, 211 aa, Artificial
  HIV Nef
MGGKWSKCSMKGWPTIRERMKRAELQPPEPAAEGVGAASRDLEKHGAITSSNTAATNADCAWLEAQEDEEVGFPVRPQVPLRPMTYKGALDLSHFLKEKGGLEGLIYSQKRQDILDLWVYHTQGYFPDWQNYTPGPGIRYPLCFGWCFKLVPMDPDQVEEANEGENNSLLHPISLHGMDDPEKEVLVWKFDSRLAFRHMAREVHPEYYKDC

SEQ ID NO: 721 - protein, 210 aa, Artificial
  HIV Nef
MGGKWSKRSLGGWSAVRERMQRAEPRAEPAAEGVGAVSRDLEKHGAITSSNTAATNADCAWLEAQEEEEVGFPVRPQVPLRPMTYKAALDISHFLKEKGGLEGIIYSQRRQDILDLWIYHTQGYFPDWQNYTPGPGIRYPLTFGWCFKLVPVEPEQVEEANKRENASLLHPMSQHGMDDPEKEVLMWKFDSRLAFHHMAREKHPEFYKDC

SEQ ID NO: 722 - protein, 206 aa, Artificial
  HIV Nef
MGGKLSKRSMFGWSRVRDRMQQAEPAAEGVGAVSRDLEKHGAITSSNTAATNADCAWLEAQEEEEVGFPVRPQVPLRPMTYKAAVDLSHFLKEQGGLDGLIYSPKRQEILDLWVYHTQGYFPDWQNYTPGPGTRFPLTFGWCFKLVPVEPEEVEKANEGENNCLLHPMSQHGIEDPEKEVLVWKFNSRLAFHHMARELHPEFYKDC

SEQ ID NO: 723 - protein, 217 aa, Artificial
  HIV Nef
MGGKWSKSRKIGWPTVRERMKQVDPAEEGRKKQAEPAAEGVGAVSRDLEKHGAITSSNTAATNADCAWLEAQEEEEVGFPVRPQVPLRPMTFKGALDLSHFLREKGGLEGLVYSQKRQDILDLWVYHTQGYFPDWQNYTRGPGIRYPLAFGWCFKLVPVDPEQVEEANEGENNSLLHPMSLHGMDDPEKEVLVWKFDSRLAFHHVPDELHPEYYKDC

SEQ ID NO: 724 - protein, 206 aa, Artificial
  HIV Nef
MGGKWSKRSVPGWNTIRKRMRRAEPAAEGVGAASRDLEQRGAITTSNTASNNAACAWQEAQEEEEVGFPVRPQVPLRPMTYKSALDLSHFLKEKGGLEGLVYSQKRQDILDLWVYHTQGFFPDWQNYTPGPGTRFPLTFGWCFKLVPVEPEKVEEATVGKNNCLLHPMNLHGMDDPEGEVLVWRFDSRLAFHHMAREKHPEYYKDC

SEQ ID NO: 725 - protein, 206 aa, Artificial
  HIV Nef
MGGKWSKSSVVGWPAIRERMKRAEPAADGVGAVSRDLEKHGAITSSNTAATNADCAWLEAQEDEEVGFPVKPQVPLRPMTYKGALDLSHFLKEKGGLEGLIYSQRRQDILDLWIYHTQGYFPDWQNYTPGPGIRYPLTFGWCFKLVPVEQEKIEEANEGENNSLLHPMSQHGMDDPEREVLEWRFDSRLAFHHMARELHPEYYKDC

SEQ ID NO: 726 - protein, 207 aa, Artificial
  HIV Nef
  misc_feature (163)..(163): Xaa can be any naturally occurring amino acid
  misc_feature (206)..(206): Xaa can be any naturally occurring amino acid
MGGKWSKRSIPGWSNIRERIRQAEPAAADGVGAVSRDLEKHGAITSSNTAATNADCAWLEAQEEEEVGFPVRPQVPLRPMDYKGAIDLSHFLRKEGGLEGLVYSQKKEDILDLWIYHTQGFFPDWQNYTPGPGVRYPLTFGWCFKLVPVEPEQVEKANEGENXCLLHPMSQHGMDDPEKEVLVWRFDSTLAFHHRARELHPEYYKXC

SEQ ID NO: 727 - protein, 206 aa, Artificial
  HIV Nef
MGGKWSKRMEGGWHAVRERMRRAEPAADGVGAVSRDLEKHGAITSSNTAANNADCAWLEAQEEEEVGFPVRPQVPLRPITYKAAVDISHFLKEKGGLEGLIFSQRRQDILDLWTYHTQGYFPDWQNYTPGPGIRYPLTFGWCFKLVPVDPEKIEEANEGENNSLLHPMSQHGMDDPEREVLEWRFDSRLAFHHMARELHPEYYKNR

SEQ ID NO: 728 - protein, 212 aa, Artificial
  HIV Nef
MGGKLSKCGGVGWSTVRERMRRAEPAADREPAVGVGAASRDLGKHGAITSSNTAATNADCAWLEAQQEEEEVGFPVRPQIPLRPMTYKAALDLSHFLKEKGGLEGLIYSQKRQDILDLWVYNTQGYFPDWQNYTPGPGIRYPLTFGWCFKLVPVDPEKVEAANEGENNCLLHPISLHGMEDPEKEVLLWKFDSRLAYHHMARELHPEYYKNC

SEQ ID NO: 729 - protein, 216 aa, Artificial
  HIV Nef
MGGKWSKHSVPGWSTVRERMRRAEPATDRVRQTEPAAVGVGAVSRDLEKHGAITSSNTAATNADCAWLEAYEDEEVGFPVRPQVPLRPMTYKAAIDLSHFLKEKGGLEGLIYSQKRQDILDLWIYHTQGYFPDWQNYTAGPGVRFPLTFGWCFKLVPVDPEKVEEANEGENNCLLHPMSQHGMDDPEKEVLVWKFDSKLALHHVARELHPEYYKDC

SEQ ID NO: 730 - protein, 207 aa, Artificial
  HIV Nef
MGGKWSKRVTGWPTVRERMRRAEPAELAADGVGAASRDLEKHGALTSSNTAATNADCAWLEAQEEEEVGFPVKPQVPLRPMTYKAALDLSHFLKEKGGLDGLIYSQKRQDILDLWVYHTQGYFPDWQNYTPGPGIRYPLTFGWCFKLVPVEPEKIEEANKGENNCLLHPMSQHMDDPEREVLVWKSDSHLAFQHYARELHPEYYKNC

SEQ ID NO: 731 - protein, 204 aa, Artificial
  HIV Nef
MGGKWSKRRAEGWQTIRERMRRAEPAEPAADGVGAVSRDLARHGAITSSNTNNADIAWLEAQEEGEVGFPVRPQVPLRPMTYKAAVDLSHFLKEKGGLEGLVHSQKRQDILDLWVYHTQGFFPDWQNYTPGPGIRYPLTFGWCYKLVPVEPDEGENNREDNSLLHPANQHGVEDSERQVLVWRFDSRLAFHHVARELHPEYFKN

SEQ ID NO: 732 - protein, 208 aa, Artificial
  HIV Nef
MGGKWSKSKMGGWPAVRERMQKAEPAADGVGAASRDLEKHGTITSSNTAANNAACTWLEAQEDEDEEVGFPVRPQVPLRPMTFKAAVDLSHFLKEKGGLDGLVFSQKRQDILDLWVYHTQGYFPDWQNYTPGPGTRYPLTFGWCFKLVPVEPDKVEEATEGENNSLLHPICLHGMDDPEKEVLVWKFDSRLAFHHVAREKHPEYYKDC

SEQ ID NO: 733 - protein, 210 aa, Artificial
  HIV Nef
MGGKWSKRSMGGWSAIRERMRRAEPRAEPAADGVGAVSRDLEKHGAITSSNTAATNADCAWLEAQEEEEVGFPVRPQVPLRPMTYKAALDISHFLKEKGGLEGLIWSQRRQEILDLWIYHTQGYFPDWQNYTPGPGIRYPLTFGWCFKLVPVEPEKVEEANEGENNSLLHPMSLHGMEDAEKEVLVWRFDSKLAFHHMARELHPEYYKDC

SEQ ID NO: 734 - protein, 203 aa, Artificial
  HIV Nef
MGGIWSKRSGSGWPAIRERMKRAEPAAEGVGAVSRDLAKHGAITSSNENNADCVWLKAQEDEEVGFPVRPQVPLRPMTYKAAHDLSHFKEKGGLEGLIYSQKRQDILDLWVYHTQGFFPDWQNYTPGPGTRYPLCFGWCFKLVPVEPEKVEEANEGENNSLLHPMSLHGMDDHEKEVLMWKFDSKLAFHHVARELHPEYFKDC

SEQ ID NO: 735 - protein, 205 aa, Artificial
  HIV Nef
  misc_feature (21)..(21): Xaa can be any naturally occurring amino acid
MGGKWSKRSVGGWPAIRERMXRAEPAAEGVGAVSRDLEKHGAITNSNTAATNADCAWLEAQEEEEVGFPVRPQVPLRPMTYKAAVDLSHFLKEKGGLEGLIYSQKRQDILDLWVYHTQGYFPDWQNYTPGPGTRYPLTFGWCFKLVPLEPDQVEEANKGENNCLLHPMSQHGMDDPEKEVLVWKFDSRLAFHHKARELHPEYYKN

SEQ ID NO: 736 - protein, 214 aa, Artificial
  HIV Nef
MGGKWSKRSMAGWPTVRERMRRAEPAAERMRRAEPAADGVGAVSRDLERHGAITSSNTAATNADCAWLEAQEEEEVGFPVRPQVPLRPMTHKAAMDLSHFLKEKGGLEGLIHSQQRQDILDLWVYHTQGYFPDWQNYTPGGTRWPLTFGWCFKLVPVEPEKIEEANAGENNCLLHPMSQHGMDDPEREGLEWRFDSRLAFHHVARELHPEYYKN

SEQ ID NO: 737 - protein, 206 aa, Artificial
  HIV Nef
MGSKWSKSSIVGWPAIRERLRQTPPAAEGVGAVSQDLERRGAITSSNTGANNPDLAWLEAQEEEEVGFPVRPQVPLRPMTYKGALDLSHFLKEKGGLEGLIYSKKRQEILDLWVYHTQGYFPDWQNYTPGPGTRYPLTLGWCFKLVPVDPEEVEKANEGENNCLLHPMSQHGMEDEDREILQWRFDSRLAFHHMARELHPEYYKDC

SEQ ID NO: 738 - protein, 206 aa, Artificial
  HIV Nef
MGNKWSKCSTVGRPAIRERMRRAPAAEGVGPASQDSDKYGALTSSSTPANNADCAWLEAQQEEEEVGFPVRPQVPLRPMTYKAVVDLSFFLEEKGGLEGLIYSKKRQDILDLWVYNTQGYFPDWQNYTPGPGVRFPLTFGWCFKLVPVDPREVEEANTGENNSLLHPMSLHGMEDSHREVLQWKFDSLLARRHMARELHPEYYKDC

SEQ ID NO: 739 - protein, 207 aa, Artificial
  HIV Nef
MGGKWSKSSIVGWPAVRERMRRTEPAAEGVGTASQDLDKHGALTTSNTAANNAACAWLEAQEEEEEVGFPVRPQVPLRPMTYKAAVDLSFFLKEKGGLEGIIYSKKRQDILDLWVYNTQGYFPDWQNYTPGPGVRYPLTFGWCYKLVPVDPKEVEEANEGENNRLLHPMSLHGMEDADGEVLRWKFDSHLAHRHMARELHPEYYKDC

SEQ ID NO: 740 - protein, 212 aa, Artificial
  HIV Nef
MGGKWSKRSKIEWPTIRDRMRRTEPAAEGVGAAAEGVGAASQDLDKHGALTSSNTAANNADCAWLEAQEEEEVGFPVRPQVPLRPMTYKAAFGLSFFLKEKGGLEGLIYSRKRQEILDLWVYHTQGFFPDWHNYTPGPGVRYPLTFGWCFKLVPVDPGEVEEANEGENCLLHPIAQHGMEDEHKEVLKWKFDSQLARRHLARELHPEFYKDC

SEQ ID NO: 741 - protein, 207 aa, Artificial; identical to SEQ ID NO: 669
  HIV Nef

SEQ ID NO: 742 - protein, 207 aa, Artificial; identical to SEQ ID NO: 670
  HIV Nef

SEQ ID NO: 743 - protein, 207 aa, Artificial
  HIV Nef
MGGTMSKCSPVGWPAIRERIRRAAPAAEGVGAASRDLDKYGALTSSNTPANNPDCAWLEAQEEEEEVGFPVRPQVPLRPMTYKAAFDLSLFLKEKGGLEGLIYSKKRQEILDLWVYNTQGFFPDWQNYTPGPGVRYPLTFGWCFKLVPVDPSEVEEINEGENNCLLHPASLHGMEDEDREVLKWKFDSHLARRHMARELHPEYYKDC

SEQ ID NO: 744 - protein, 207 aa, Artificial
  HIV Nef
MGGKWSKCSIVGWPAIRERMRRAEPAAEGVGAASQDLDKHGALTSSNTDTTNADCAWLRAQEEEGEVGFPVTPQVPLRPMTYKSAFDLSFFLKEKGGLEGLIYSKKRQEILDLWVYHTQGFFPDWQNYTPGPGVRYPLTFGWCFKLVPVDPREVEEANEGEDNCLLHPVCQHGMEDEHREVLKWKFDSQLARRHMARELHPEFYKDC

SEQ ID NO: 745 - protein, 207 aa, Artificial
  HIV Nef
MGGKWSKCSIVGWPDIRERMRRTQPAAEGVGAASQDLDKYGALTSSNTDITNPDCAWLKAQEEEEEVGFPVRPQVPLRPMTFKEAVDLSFFLKEKGGLEGLIYSKKRQEILDLWVYHTQGYFPDWQNYTPGPGVRYPLTFGWCFKLVPVDPREVEEANEGEDNCLLHPVCQHGMDDEHREVLQWKFDSLLAHRHRARELHPEFYKDC

SEQ ID NO: 746 - protein, 207 aa, Artificial
  HIV Nef
MGGKWSKCSIVGWPAVRERMRRTEPAAEGVGAASQDLDKYGALTSSNTDTTNADCAWLRAQEEEEEVGFPVRPQVPLRPMTFKGAFDLSFFLKEKGGLEGLIYSKKRQEILDLWVYHTQGFFPDWQNYTPGPGVRFPLTFGWCFKLVPVDPREVEEANEGENNCLLHPVCQHGMEDEHREVLQWKFDSHLAHRHMARELHPEYYKDC

SEQ ID NO: 747 - protein, 204 aa, Artificial
  HIV Nef
MGGKWSKCSIVGWPEIRERMRRTQPAADGVGAASQDLDKYGALTSSNTDTTNADCAWLRTQEEEEEVGFPVRPQVPLRPMTFKGAFDLSFFLKEKGGLEGLIYSKKRQEILDLWVYHTQGYFPDWQNYTPGPGTRFPLTFGWCFKLVPVDPREVEEANEGEDNCLLHPVCQHGMEDDHREVLMWKQLAHRHIARELHPEFYKDC

SEQ ID NO: 748 - protein, 200 aa, Artificial
  HIV Nef
MGGKWSKCSIVGWPDIRERMRRTEPAAEGVGAASQDLDRYGALTSSNTDTTNTEEEEGVGFPVRPQVPLRPMTFKGALDLSFFLKEKGGLEGLIYSKKRQEILDLWVYHTQGYFPDWQNYTPGPGVRFPLTFGWCFKLVPVDPREVEEANKGEDNCLLHPVCQHGMEDDHNEVLVWKFDSQLAHKHRARELHPEFYNKDC

SEQ ID NO: 749 - protein, 204 aa, Artificial
  HIV Nef
MGGKWSKNRIVGWPQVRERIRRTPAAAEGVGAASQDLDKHGAITSSNMNNADCAWLEAQEEEEVGFPVRPQVPLRPMTYKGAFDLSFFLKEKGGLDGLIYSKKRQEILDLWVYHTQGYFPDWQNYTPGPGIRYPLCFGWCYKLVPVDPKEVEEDNKDESNCLLHPMSQHGVDDEEREVLMWKFDSSLARRHIARELRPEYYKDC

SEQ ID NO: 750 - protein, 211 aa, Artificial
  HIV Nef
MGGKWSKSCIVGWPQVRERIRQTPVAEERQTPAAAEGVGAVSQDLDKHGAVTSSNINNADNVWLEAQEEEEVGFPVRPQVPLRPMTYKGAFDLSFFLKEKGGLDGLIHSKRRQEILDLWVHNTQGYFPDWQNYTPGPGVRYPLCFGWCFKLVPVDPREVEEDNKGENNCLLHPMSQHGIDDDEREVLMWKFDSSLARRHIARELHPEYYKD

SEQ ID NO: 751 - protein, 200 aa, Artificial
  HIV Nef
MGNKWSKSWPQIRERIRQTPVATEGVGAVSQDLDKHGAVTSSNMNSAASVWLEAQEDEEVGFPVRPQVPTRPMTYKGAFDLGFFLKEKGGLDGLIYSKKRQEILDLWVYNTQGFFPDWQNYTPGPGTRYPLCFGWCYKLVPVDPREVEEDNKGENNCLLHPMSQHGIEDEEREVLMWKFDSSLARRHIARELHPEYYKDC

SEQ ID NO: 752 - protein, 204 aa, Artificial
  HIV Nef
MGGKWSKSSIVGWPQVREKIKQTPPAAEGVGTVSQDLDKHGAVTSSNMNNDDCVWLGAQEEEEVGFPVRPQVPLRPMTYKGAFDLSFFLKEKGGLDGLIYSKKRQEILDLWVYNTQGFFPDWHNYTPGPGIRYPLCFGWCFKLVPVDPREVEEDNKGENNCLLHPLSQHGIEDEEREVLMWKFDSALARKHTARELHPEYYKDC

SEQ ID NO: 753 - protein, 204 aa, Artificial
  HIV Nef
MGGKWSKSSIVGWPQVREKIKQTPPAAEGVGAVSQDLDKHGAVTSSNMNNADCEWLRAQEEEEVGFPVRPQVPLRPMTFKGAFDLSFFLKEKGGLDGLIYSKKRQEILDLWVYNTQGFFPDWQNYTPGPGIRYPLCFGWCFKLVPVDPREVEEDNKEENNCLLHPMSQHGIDDEEREVLMWKFDSTLARKHIAREQHPEFYKDC

SEQ ID NO: 754 - protein, 204 aa, Artificial
  HIV Nef
MGGKWSKSSIVGWPQVRERIKQTPPAAEGVGAVSQDLDKHGAVTSSNMNNADCVWLRAQEEEGVGFPVRPQVPLRPMTYKGAFDLSFFLKEKGGLEGLVYSKKRQEILDLWVYHTQGFFPDWHNYTPGPGIRYPLCFGWCFKLVPVDPREVEEDNKGENNCLLHPMSQHGIEDEEREVLIWKFDSALARRHIARELRPEFYKDC

SEQ ID NO: 755 - protein, 202 aa, Artificial
  HIV Nef
MGAKWSKRGWPQVRERIRQTPPAAEGVGAVSRDLDKHGAVTSSNMNNADSVWLRAQEEDEEVGFPVRPQVPLRPMTFKEAFDLSFFLKEKGGLDGLIYSKKRQEILDLWVYNTQGFFPDWQNYTPGPGIRFPLCFGWCFKLVPVDPREVEEDNKGENNCLLHPMSQHGMGDGEREVLMWKFDSALARKHIAREMHPEYYKDC

SEQ ID NO: 756 - protein, 204 aa, Artificial
  HIV Nef
MGSKWSKSSIVGWPQVREKIKQTPPATEGVGAVSQDLDKHGAITSSNIDNADCVWLRAQEDEEVGFPVMPQVPLRPMTYKGAFDLSFFLKEKGGLDGLIYSKKRQEILDLWVYNTQGFFPDWQNYTPGPGIRFPLCFGWCFKLVPVDQREVEEDNKGENNCLLHPMSQHGIEDEEREVLMWKFDSALARKHVAREQHPEYYKDC

SEQ ID NO: 757 - protein, 201 aa, Artificial
  HIV Nef
MGNKWSKSWPRVRERIKQTPPAAEGVGAVSQDLDKHGAVTSTNMDNADSVWLRAQEEDEEVGFPVEPQVPLRPMTYKGAFDLSFFLEEKGGLDGLVYSKKRQEILDLWVYNTQGFFPDWQNYTPGPGVRLPLCFGWCFKLVPVDPREVEEDNKGENNSLLHPMSQHGIEDEEREVLIWKFDSSLARKHLARELHPEYYKDC

SEQ ID NO: 758 - protein, 206 aa, Artificial
  HIV Nef
MGGKWSKSSIVGWPKVRERIRQTPPAATGVGAASQDLDRHGAITSSNTADTNADCAWLEAQEEEEVGFPVRPQVPLRPMTYKAAFDLGFFLKEKGGLDGLVYSKKRQEILDLWVYHTQGFFPDWQNYTPGPGTRYPLTFGWCFNLEPIDPAEIEEANKEENNSLLHPICQHGMEDEDREVLVWRFDSSLARTHRARELHPEYYKDC

SEQ ID NO: 759 - protein, 206 aa, Artificial
  HIV Nef
MGGKWSKSSLVGWPKVRERIIQTPPAATGVGAASQDLDRHGAITSSNTAETNADCAWLEAQEDEEVGFPVKPQVPLRPMTYKGAFDLGFFLKEKGGLDGLIYSKKRQEILDLWVYHTQGFFPDWQNYTPGPGTRYPLTFGWCFKLEPMDPAEVEEANKGENNSLLHPICQHGMEDEDREVLVWRFDSSLARRHIARERHPEFYKDC

SEQ ID NO: 760 - protein, 206 aa, Artificial
  HIV Nef
MGGKWSKSSIVGWPQVRERIRQTPTAAKGVGAASQDLDKYGAITSSNTAFTNADCAWLEAQEEEEVGFPVRPQVPLRPMTYKGALDLSHFLKEKGGLEGLIYSRKRQEILDLWVYHTQGFFPDWHNYTPGPGTRFPLTFGWCFKLVPMDPKAVEEATEGENNSLLHPICQHGIEDEDREVLVWRFDSSLAFTHRAREMHPEFYKDC

SEQ ID NO: 761 - protein, 206 aa, Artificial
  HIV Nef
MGGKWSKSSIVGWPKVMKRMRQTPTAATGVGAASQDLDRHGAITSSNTAQTNPDCAWLEAQEDENVGFPVRPQVPLRPMTYKGAVDLSHFLKEKGGLDGLIYSKKRQEILDLWVYNTQGFFPDWQNYTPGPGTRFPLTFGWCFKLVPMDPAEVEEANEGENNSLLHPICQHGMEDDDREVLIWRFDSRLAFRHTARELHPEYYKDC

SEQ ID NO: 762 - protein, 207 aa, Artificial
  HIV Nef
  misc_feature (207)..(207): Xaa can be any naturally occurring amino acid
MGGKWSKSSIVGWPQIRDRIRQTPPAARGVGAASQDLDRHGAITSSNTAATNAACAWLEAQEEEEVGFPVRPQVPLRPMTYKAAVDLSHFLKEKGGLEGLIYSKKRQEILDLWVYHTQGFFPDWQNYTPGPGTRFPLTFGWCFKLVPMDPADIEKDTEGENNSLLHPICQHGMEDEDREVLVWRFDSRLAFTHKAREMHPEFYKDCX

SEQ ID NO: 763 - protein, 209 aa, Artificial
  HIV Nef
MGGKWSKSSLVGWPQVRERIRRTQPTPSAAIGVGAVSQDLDRHGAITSRNTAHTNADCAWLEAQEEEEVGFPVRPQVPLRPMTYKAAVDLSHFLKEQGGLEGLIYSKKRQEILDLWVYHTQGFFPDWQNYTPGPGIRYPLTFGWCYKLVPMDPAEVEEANQGENNSLLHPICQHGMEDEDKEVLVWRFDSRLAFRHTARELHPEYYKDC

SEQ ID NO: 764 - protein, 201 aa, Artificial
  HIV Nef
MGGKWSKSSIVGWPQVRERIRRAPAPAARGVGPVSQDLDKYGAVTSSNTAANNADCAWLEAQEEEEVGFPVRPQVPLRPMTYKGAFDLSHFLKKGGLDGLIYSKKRQEILDLWVYHTQGYFPDWQPGIRFPLTFGWCYKLVPVDPAEVEEATEGENNSLLHPICQHGMDDEEKEVLMWKFDSRLALTHRARELHPEFYKDC

SEQ ID NO: 765 - protein, 207 aa, Artificial
  HIV Nef
MGGKWSKSSIVGWPQIRERIRRAPAPAARGVGPVSQDLDKYGAVTSSNTAANNADCAWLEAQKEEEVGFPVRPQVPLRPMTYKGAFDLSHFLKEKGGLDGLIYSKKRQEILDLWVYHTQGYFPDWQNYTPGPGIRFPLTFGWCYKLVPVDPDEVEEATEGENNSLLHPICQHGMDDEEKEVLMWKFDSRLALTHRARELHPEFYKDC

SEQ ID NO: 766 - protein, 219 aa, Artificial
  HIV Nef
MGGKWSKSSIVGWPEIRERMRRARAEPERMRRAQAEPAAAGVGAVSQDLDKHGAITINNTAATNPDKTWLEAQEEEEEVGFPVRPQVPLRPMTFKGALDLSHFLKEKGGLDGLIYSKKRQEILDLWVYHTQGFFPDWDNYTPGPGERFPLCFGWCFKLVPVDPQEVEEATEGENTCLLHPISQHGMEDEEREVLKWKFDSRLAYKHVARELHPEFYKDC

SEQ ID NO: 767 - protein, 215 aa, Artificial
  HIV Nef
MGGKWSKSSLVGWPAIRERMRRARAEPAAQAEPAAAGVGAVSRDLDKHGAITSSNTAATNPDKAWLEAQEEDEEVGFPVRPQVPLRPMTFKAALDLSHFLKEKGGLDGLIYSKQRQDILDLWVYNTQGYFPDWQNYTPGPGERFPLCFGWCFKLVPVDPQEVEEANEGENNCLLHPISQHGMEDEEREVLKWKFDSRLAFKHIARELHPEFYKDC

SEQ ID NO: 768 - protein, 210 aa, Artificial
  HIV Nef
MGNKWSKSWPAVRERMRRARAEPARAEPAAVGVGAVSQDLDKYGAITTSNTAATNPDKAWLEAQEEEEEVGFPVRPQVPLRPMTYKAAVDLSHFLKEKGGLEGLIYSKKRQEILDLWVYNTQGYFPDWQNYTPGPGTRFPLCFGWCFKLVPVDPQEVEEITAGEDNCLLHPISQHGMEDEEREVLKWKFDSLLAYRHMARELHPEFYKDC

SEQ ID NO: 769 - protein, 206 aa, Artificial
  HIV Nef
MGGKWSKSSVVGWPAIREKMRRTPPAAEGVGAVFQDLDNRGAVTIRNTVATNPDMAWVEAQEEEEEVGFPVKPQVPLRPMTYKAAVDLSHFLKEKGGLEGLIYSKKRQDILDLWVYNTQGYSPDWQNYTPGPGIRYPLTLGWCFKLVPVNPEEVEKANEGEDNCLLHPMSLHGMEDDDREVLQWKFDSSLALRHIARERHPEFYQD

SEQ ID NO: 770 - protein, 209 aa, Artificial
  HIV Nef
MGGKWSKNRIVGWPAIRERMRRTPPAAGAAAEGVGSVSQDLERRGAITSNNTAATNADLAWVEAQEEEEVGFPVRPQVPLRPMTFKGALDLSHFLKEKGGLDGLIWSRKRQKILDLWVYNTQGYFPDWQNYTPGPGTRYPLTFGWCFKLVPVDPEEVEKANEGENKCLLHPMHQHGMDDEDGEVLRWKFDSSLALKHIARERRPEFYQD

SEQ ID NO: 771 - protein, 205 aa, Artificial
  HIV Nef
MGNKWSKGWSQVRERMRRTPPTERAAEGVGAVSQDLDKHGAITSSNTATTNAACAWVEAQTEEEVGFPVRPQVPVRPMTYKAAFDLSFFLKEKGGLDGLIYSKKRQEILDLWVYNTQGFFPDWQNYTPGPGTRFPLTFGWCYKLVPVDPEEVEELTKGENNCLLHPICQHGAEDEEREVLKWKFDSSLARRHIAREKHPEFYKDC

SEQ ID NO: 772 - protein, 209 aa, Artificial
  HIV Nef
MGSKWSKSSIVGWPQVRERIRQTPPTEGAAKGVGAVSQDLDKHGAITSNNTPTTNAACAWLEEQTEDEVGFPVRPQVPLRPMTFKGAFDLGFFLKEKGGLDGLIYSKKRQEILDLWVYHTQGYFPDWQNYTPGPGIRYPLTFGWCYKLVPVDPREVEEETKGENNSLLHPMCQHGAEDEEGEVLMWKFDSSLARRHIARELHPDFYKDC

SEQ ID NO: 773 - protein, 209 aa, Artificial
  HIV Nef
MGGKWSKSSLVGWPQVRERIRQTPPTEGAAEGVGAVSQDLDTHGAITSSNTVTTNAACAWLEAQTEDEVGFPVRPQVPLRPMTFKGAFDLSFFLKEKGGLDGLIYSKKRQDILDLWVYHTQGFFPDWQNYTPGPGIRYPLTFGWCYKLVPVDPREVEEDTKGENNCLLHPMSQHGMEDEEREVLMWKFDSSLARRHTAREMHPEFYKDC

SEQ ID NO: 774 - protein, 216 aa, Artificial
  HIV Nef
  misc_feature (172)..(172): Xaa can be any naturally occurring amino acid
  misc_feature (188)..(188): Xaa can be any naturally occurring amino acid
  misc_feature (206)..(206): Xaa can be any naturally occurring amino acid
  misc_feature (208)..(208): Xaa can be any naturally occurring amino acid
  misc_feature (213)..(213): Xaa can be any naturally occurring amino acid
MGGKWSKSSIVGWPKVRERMRQTPPAAERQTPPAAEGVGAASQDLAKHGAITSSNTAATNADCAWLEAQSEDNEEVGFPVRPQVPLRPMTYKAAFDLGFFLKEKGGLDGLIYSKKRQEILDLWVYHTQGFFPDWQNYTPGPGIRYPLTFGWCFKLVPVDPKEVEEETKGENXSLLHPMCQHGVDDPEXEVLMWKFDSSLARRHIAXEXHPEFXKDC

SEQ ID NO: 775 - protein, 207 aa, Artificial
  HIV Nef
MGGKWSKSSIVGWPEIRERLRRTPPAAAADGVGAVSKDLEKFGAITSSNTAHTNDTCAWLEAQEDEEVGFPVRPQVPLRPMTYKAAFDLGFFLKEKGGLDGLIYSQKRKEILDLWVYHTQGFFPDWQEYTPGPGVRYPLCFGWCYKLVPVDPREVEEANEGENNCLLHPMSQHGMDDEEREVLKWVFDSSLARKHIARELHPDFYKD

SEQ ID NO: 776 - protein, 207 aa, Artificial
  HIV Nef
MGGNWSKSSIVGWPEIRERLRRTPPTAAAEGVGAASKDLERHGAITSSNTSQNNAACAWLEAQEDEGVGFPVRPQVPLRPMTYKGAFDLSFFLKEKGGLDGLIYSKKRQEILDLWVHNTQGFFPDWQNYTPGPGIRYPLCFGWCYKLVPVDPREVEEANEGENNCLLHPMSQHGIEDEDREVLRWKFDSSLARRHIARELHPDFYKD

SEQ ID NO: 777 - protein, 215 aa, Artificial
  HIV Nef
MGGKWSKSSIVGWPAIRERIRKTDPRERRRPEPAADGVGAVSRDLERHGAITSSNTATTNAACAWVEAQEEDEEVGFPVRPQVPLRPMTYKAAVDLSHFLRKKGGLEGLVYSQKRQDILDLWVYHTQGFFPDWQNYTPGPGIRYPLTFGWCFELVPVDPEVVEKATEGEDNCLLHPICQHGMEDEEKEVLVWRFNSRLAFEHKAKEKYPEYFKNC

SEQ ID NO: 778 - protein, 206 aa, Artificial
  HIV Nef
MGGKWSKSSIVGWPAIRERIRRTNPAADGVGAVSRDLEKHGAITSSNTASTNADCAWLEAQEESDEVGFPVRPQVPLRPMTYKEALDLSHFLKEKGGLEGLIWSKKRQEILDLWVYNTQGIFPDWQNYTPGPGIRYPLTFGWCYELVPVDPQEVEEDTEGETNSLLHPICQHGMEDPERQVLKWRFNSRLAFEHKAREMHPEFYKN

SEQ ID NO: 779 - protein, 207 aa, Artificial
  HIV Nef
MGGKWSKSSLVGWPAIRERIRKTDPAADGVGAVSRDLEKHGAITSSNTASTNDTCAWLEAQEESEEVGFPVRPQVPLRPMTYKEAVDLSHFLKEKGGLEGLIWSKKRQEILDLWVYNTQGIFPDWQNYTPGPGIRYPLTFGWCFQLVPVDPQEVEEATEREDNCLLHPMCQQGMEDPERQVLMWRFNSRLALEHKARELHPEFYKDC

SEQ ID NO: 780 - protein, 206 aa, Artificial
  HIV Nef
MGGKWSKSSIVGWPAVRERMRRTEPAAEGVGAASRDLEKHGAITSSNTAQTNDACAWLEAQEEEEVGFPVRPQVPLRPMTYKEAVDLSHFLKEKGGLEGLVWSPKRQEILDLWVYHTQGFFPDWQNYTPGPGIRYPLTFGWCFELVPMEPKEVEENTEGEDNCLLHPINQHGMEDPEREVLVWRFNSRLAFEHKAKMKHPEYYKDC

SEQ ID NO: 781 - protein, 205 aa, Artificial
  HIV Nef
MGGKWSKSSIVGWPAVGERMRQTPTAAEGVGAVSRDLDRRGAITSSNTRTTNPDLAWLEAQEEEEVGFPVRPQVPVRPMTYKAAVDLSHFLKEKGGLEGLIYSKKRGDTLDLWVYHTQGYFPDWQNYTPGPGIRYPLTLGWCFKLVPVDPEEVEKANEGENNCLLHPMSQHGMEDEDREVLRWKFDSSLALRHIARERHPEFYQD

SEQ ID NO: 782 - protein, 208 aa, Artificial
  HIV Nef
MGGKWSKSSIVGWPAIRERMRRTPPTPPAAEGVGAVSQDLERRGAITSSNTRANNPDLAWLEAQEEDEVGFPVRPQVPLRPMTYKGAVDLSHFLKEKGGLEGLIYSKRRQEILDLWVYHTQGYFPDWQNYTPGPGIRYPLTMGWCFKLVPVDPEEVEKANEGENNCLLHPMSQHGMEDEDKEVLKWEFDSRLALRHIARERHPEYYQD

SEQ ID NO: 783 - protein, 206 aa, Artificial
  HIV Nef
  misc_feature (92)..(93): Xaa can be any naturally occurring amino acid
  misc_feature (102)..(102): Xaa can be any naturally occurring amino acid
MGGKWSKSSIVGWPAIRERMRRPPPAAAEGVGAVSQDLERRGAITSSNTGATNPDLAWLEAQEDEEVGFPVRPQVPLRPMTYKGAFDLSQFXXEKGGLEGLXYSKKRQEILDLWLYHTQGYFPDWQNYTPGPGVRYPLTFGWCFKLVPVEPEEVEKANEGENNCLLHPMSQHGMEDEDREVLKWKFDSRLALKHIARERHPEFYRD

SEQ ID NO: 784 - protein, 205 aa, Artificial
  HIV Nef
MGGKWSKSSIVGWPAVRERMRRTPPAAEGVGAVSQDLDRRGAVTSSNTAATNPDLAWLEAQEDEEVGFPVRPQVPLRPMTFKAAVDLSHFLKEKGGLEGLIYSKKRQEILDLWVYHTQGFFPDWQNYTPGPGIRFPLTFGWCFKLVPVDPDEVEKANEGENNCLLHPMSQHGMDDEDREVLRWEFDSRLAFRHIAREKHPEFYQN

SEQ ID NO: 785 - protein, 205 aa, Artificial
  HIV Nef
MGGKWSKSSIVGWPAIRERIRRTPVAAEGVGAVSQDLDKRGAITNSNTGATNADLAWLEAQEDEEVGFPVRPQVPLRPMTYKAALDLSHFLKEKGGLEGLIYSRKRQEILDLWVYHTQGYFPDWQNYTPGPGPRFPLTFGWCFKLVPVDPEEVEKANEGENNCLLHPMSLHGMEDDDKEVLKWQFDSRLALRHIARERHPEYYKD

SEQ ID NO: 786 - protein, 205 aa, Artificial
  HIV Nef
MGGKWSKGWPSVRERIRRTPPAAPAADGVGAVSQDLAKHGAITSSNTSSTNPDCAWLEAQEEEEVGFPVGPQVPLRPMTYKGAFDLSHFIKEKGGLDGLIYSKKRQEILDLWVYNTQGYFPDWHNYTPGPGIRYPLCFGWCFKLVPMDPQEVEEANVGENNSLLHPICQHGIDDTEREVLVWKFDSRLALKHLAREKHPEYYKDC

SEQ ID NO: 787 - protein, 207 aa, Artificial
  HIV Nef
MGNKWSKRKVAGWPEVRERLRQHPAAAEGVGAVSQDLDRHGAITSRNTAGTNPDCAWLEAQEEDSEVGFPVRPQVPLRPMTYKAAFDLSFFLKEKGGLDGLVYSKKRQEILDLWVYHTQGFFPDWQNYTPGPGTRVPLTFGWCFKLVPMEPSEVEEANKGENNSLLHPICQHGMEDEDGEVLVWRFDSSLARRHLARELHPEYYKDC

SEQ ID NO: 788 - protein, 207 aa, Artificial
  HIV Nef
MGGKWSKSSIVGWPQIRERIRQTPVAAEGVGAVSQDLARHGAITSSNTATNNPDCAWLEAQEEDSDVGFPVRPQVPLRPMTYKAAFDLSFFLKEKGGLDGLIYSKRRQDILDLWVYNTQGFFPDWQNYTPGPGTRLPLTFGWCFKLVPMDPAEIEEANKGENISLLHPICQHGMEDEDREVLVWRFNSSLARRHLARELHPEYYKDC

SEQ ID NO: 789 - protein, 207 aa, Artificial
  HIV Nef
MGGKWSKSSIVGWPEVRERIRNTPTAAEGVGAVSQDLDRHGAITSSNTAANNPDCAWLEAQEEDSEVGFPVRPQVPLRPMTFKGAFDLSFFLKEKGGLDGLIYSKKRQEILDLWVYNTQGYFPDWQNYTPGPGTRFPLTFGWCFKLVPMDPAEVEEANKGENNSLLHPICQHGMEDEDREVLVWRFDSSLARRHIARELHPEYYKDC

SEQ ID NO: 790 - protein, 207 aa, Artificial
  HIV Nef
MGGKWSKGCISGWPAVRERIRQTEPAAEGVGAVSQDLDRRGAVTINNIASNNADSAWLEAQEEEEEVGFPVRPQVPLRPMTYKGAFDLSHFLKEKGGLEGLIYSKKRQEILDLWVYNTQGYFPDWHNYTPGPGERYPLTFGWCFKLVPVDPQDVEKANEGENNSLLHPMCQHGIEDPEREVLMWKFDSRLALRHRAKELHPEFYKDC

SEQ ID NO: 791 - protein, 207 aa, Artificial
  HIV Nef
MGGKWSKSSIVGWPAVRERIRRAQPAADGVGAVSRDLDRRGAVTINNTAATNPDVAWLEAQEEAEEVGFPVRPQVPLRPMTYKAALDLSHFLKEKGGLDGLIYSKKRQEILDLWVYNTQGYFPDWQNYTPGPGEGYPLTFGWCFKLIPVDPQEVERANEGENNCLLYPICQHGMEDEEGEVLMWKFDSRLAFTHTAREKHPEFYKDC

SEQ ID NO: 792 - protein, 206 aa, Artificial
  HIV Nef
MGGKWSKSRMGGWSTIRERMRRAEPVAEGVGAVSRDLDRRGAVTINNTASTNRDAAWLEAQEDGEEVGFPVRPQVPLRPMTYKGAFDLSHFLKEKGGLDGLIYSKQRQDILDLWVYNTQGYFPDWQNYTPGPGERFPLTFGWCFKLVPVNPQEVEQANEGENNSLLHPMSLHGMEDDGREVLMWKFDSRLALTHLARVKHPEYKDC

SEQ ID NO: 793 - protein, 204 aa, Artificial
  HIV Nef
  misc_feature (72)..(72): Xaa can be any naturally occurring amino acid
  misc_feature (132)..(132): Xaa can be any naturally occurring amino acid
MGNKWSKSWPQVRDRMRRAAPAPAADGVGAVSQDLAKHGAITSSNTAATNDDCAWLEAQTEEEVGFPVRPQXPLRPMTYKGAFDLSFFLKEKGGLDGLIYSKKRQEILDLWVHNTQGYFPDWQNYTPGPGTXYPLTFGWCFKLVPVDPSEVEEANEGENNCLLHPACQHGIEDEEREVLKWKFDSSLARRHIARELHPEFYKDC

SEQ ID NO: 794 - protein, 203 aa, Artificial
  HIV Nef
MGNKWSKSWPQVRERMRRAPAPAADGVGAVSQDLAKHGAITSSNTAATNADCAWLEAQTEEEVGFPVKPQIPLRPMTYKGAVDLSFFLKEKGGLDGLIYSKKRQEILDLWVHNTQGYFPDWQNYTPGPGIRYPLTFGWCYKLVPVDPSEVEEANEGENNCLLHPICQHGIEDEEREVLQWKFDSSLARRHIARELHPEFYKDC

SEQ ID NO: 795 - protein, 205 aa, Artificial
  HIV Nef
MGGKWSKSSIVGWSTVRERMRKTPPAADGVGAVSQDLDKHGAVTSSNTAFNNPDCAWLEAQEDEDVGFPVRPQVPLRPMTFKGAFDLGFFLKEKGGLDGLIYSKRRQEILDLWVYHTQGFFPDWQNYTPGPGIRYPLTFGWCYKLVPVDPREVEEATEGENNCLLHPVNQHGMEDEHREVLKWKFDSSLARKHVAREMHPEYYKD

SEQ ID NO: 796 - protein, 214 aa, Artificial
  HIV Nef
MGGKWSKSSIVGWPAIRERMRRARPAADRVGTQPAADGVGAVSQDLARHGAVTSSNTSHNNPDCAWLEAQEEEEVGFPVRPQVPLRPMTYKAAFDLGFFLKEKGGLDGLIYSKKRQEILDLWVYHTQGFFPDWQNYTPGPGIRYPLTFGWCYKLVPVDPAEVEETTEGEDNCLLHPINQHGMEDEHREILMWKFDSSLARRHVARELHPDYYKD

SEQ ID NO: 797 - protein, 212 aa, Artificial
  HIV Nef
MGKIWSKSSLVGWPEIRERMRRQTQEPAVEPAVGAGAASQDLANRGAITIRNTRDNNESIAWLEAQEEEEEVGFPVRPQVPLRPITYKQAFDLSFFLKDKGGLEGLVWSRKRQDILDLWMYHTQGILPDWHNYTPGPGIRYPVTFGWCFKLVPLSAEEVEEANEGDNNALLHPICQHGADDDHKEVLVWRFDSSLARRHVARELHPEFYKNC

SEQ ID NO: 798 - protein, 213 aa, Artificial
  HIV Nef
MGNALRKGKFEGWAAVRERMRRTRTFPESEPCAPGVGQISRELAARGGIPSSHTPQNNAALAFLESHQEEEVGFPVAPQVPLRPMTYKGAFDLSFFLKEKGGLEGLIYSHKRAEILDLWVYNTQGFFPDWQNYTPGPGTRFPLTFGWLFKLVPVSEEEAERLGNTCERANLLHPACAHGFEDTHKEILMWKFDRSLGNTHVAMITHPELFQKD

SEQ ID NO: 799 - protein, 212 aa, Artificial
  HIV Nef
MGNAWSKSKFAGWSEVRDRMRRSSSDPQQPCAPGVGAVSRELATRGGISSSHTPQNNAALAFLDSHKDEDVGFPVRPQVPLRPMTFKAAFDLSFFLKEKGGLDGLIYSHKRAEILDLWIYHTQGFFPDWQCYTPGPGPRFPLTFGWLFKLVPVSAEEAERLGNTNEDASLLHPACNHGAEDAHGEILKWQFDRSLGLTHIALQKHPELFPSN

SEQ ID NO: 800 - protein, 211 aa, Artificial
  HIV Nef
MGNVLGKDIFKGWSAVRERMRGTSPDPEPCAPGVGQISRELAARGGIPSSYTPQNNAALAFLESHQDEEVGFPVRPQVPLRPMTYKGAFDLSFFLKEKGGLDGLIYSHKRAEILDLWVYHTQGFFPDWQGYTPGPGPRFPLTFGWLFKLVPVSEAEAEELGNKCERASLLHPACNHGFEDNHGQILKWQFDRSLGSTHVAMVTNPELFNKD

SEQ ID NO: 801 - protein, 211 aa, Artificial
  HIV Nef
MGNVLGKDKFKGWSAVRERMRKTSPEPEPCAPGVGQVSRELAARGGISNSHTPQNNAALAFLESHQDEDVGFPVRPQVPLRPMTYKGAFDLSFFLKEKGGLDGLIYSPERAEILDLWVYHTQGFFPDWQNYTPGPGTRFPLTFGWLFKLVPVSEAEAEELGNKCDRAKLLHPVCNHGFEDPHKEMLKWQFDRSLGSTHVALITHPELFLKD

SEQ ID NO: 802 - protein, 207 aa, Artificial
  HIV Nef
MGNKWSKQWPAIRERMRRARPAAEPAADGVGAASRDLEKYGAITSSNTAETNEACAQLEAAQEDGEVGFPVRPQVPLRPMTYKAAFDLGFFLKEKGGLDGLIYSKKRQEILDLWVYNTQGYFPDWQNYTPGPGIRYPLTFGWPFKLVPVDPKEVEEANEGENNCLLHPICQHGMDDEEKEVLMWKFDSSLARRHLARELHPEFYKDC

SEQ ID NO: 803 - protein, 999 aa, Artificial
  HIV Pol
FFRENLAFPQGEAREFPPEQTRANSPTSRELQVRGDKPHSEAGAERQGTLNFPQITLWQRPLVSIKVGGQIKEALLDTGADDTVLEDINLPGKWKPKMIGGIGGFIKVRQYDQILIEICGKRAIGTVLVGPTPVNIIGRNMLTQLGCTLNFPISPIETVPVKLKPGMDGPKVRQWPLTEEKIKALTAICDEMEKEGKITKIGPENPYNTPVFAIKKKDSTKWRKLVDFRELNKRTQDFWEVQLGIPHPAGLKKKKSVTVLDVGDAYFSVPLDENFRKYTAFTIPSINNETPGIRYQYNVLPQGWKGSPAIFQSSMTRILEPFRTQNPEIVIYQYMDDLYVGSDLEIGQHRVKIEELRRHLLKWGFTTPDKKHQKEPPFLWMGYELHPDKWTVQPIQLPEKEDWTVNDIQKLVGKLNWASQIYPGIKVRQLCKLLRGAKALTDIVPLTEEAELELAENREILKEPVHGVYYDPSKDLIADIQKQGNDQWTYQIYQEPFKNLKTGKYAKMRTAHTNDVKQLTEAVQKISRESIVIWGKTPKFRLPIQKETWETWWTDYWQATWIPEWEFVNTPPLVKLWYQLEKDPLVGVETFYVDGAANRDTKIGKAGYVTDKGRRKVITLTETTNQKTELQAIQLALQDSGPEVNIVTDSQYALGIIQAQPDKSESELVNQIIEQLIKKEKVYLSWVPAHKGIGGNEQIDKLVSSGIRKVLFLDGIDKAQDEHEKYHSNWRAMANEFNLPPIVAKEIVASCDKCQLKGEAIHGQVDCSPGIWQLDCTHLEGKTILVAVHVASGYMEAEVIPAETGQETAYYILKLAGRWPVKIIHTDNGSNFTSAAVKAACWWAGIQQEFGIPYNPQSQGVVESMNKELKKIIGQVRDQAEHLKTAVQMAVFIHNFKRRGGIGGYSAGERIIDIIATDIQTRELQKRIIQIQNFRVYYRDSRDPIWKGPAKLLWKGEGAVVIQDNSDIKVIPRRKAKIIKDYGKQMAGADCVAGRQDED

SEQ ID NO: 804 - protein, 1000 aa, Artificial
  HIV Pol
FFRENLAFPQGEAGEFPSEQTRANSTTSRKLQVRGDNNPCSEAGAERQGTLNCPQITLWQRPLVSIRVGGQIKEALLDTGADDTVLEEISLPGKWKPKMIGGIGGFIKVRQYDQILIEICGKKAIGTVLVGPTPVNIIGRNMLTQLGCTLNFPISPIETVPVKLKPGMNGPKVKQWPLTEEKIKALTAICEEMEREGKITKIGPENPYNTPVFAIKKKDSTKWRKLVDFRELNKRTQDFWEVQLGIPHPAGLKKKKSVTVLDVGDAYFSVPLDENFRKYTAFTIPSINNETPGIRYQYNVLPQGWKGSPAIFQDSMTKILEPFRAQNPEIVIYQYMDDLYVGSNLEIGQHRAKIEELKDHLLKWGFTTPDKKHQKEPPFLWMGYELHPDKWTVQPIQLPEKNSWTVNDIQKLVGKLNWASQIYPGIKVRQLCRLLRGAKVLTDIVPLTEEAELELAENREILREPVHGVYYDPSKDLIAEIQKQGQDQWTYQIYQEPFKNLKTGKYAKMRTAHTNDVKQLTEAVQKIAQESIVIWGKTPKFRLPIQKETWEIWWTDYWQATWIPEWEFVNTPPLVKLWYQLEKEPILGAETFYVDGAANRETKKGKAGYVTDRGRQKIVPLTETTNQKTELHAIQLALQDSGSEVNIVTDSQYALGIIQAQPDKSESELVNQIIEQLIKKERVYLSWVPAHKGIGGNEQVDKLVSKGIRRVLFLDGIDKAQEEHEKYHSNWRAMASEFNLPPIVAKEIVASCDKCQLKGEAIHGQVDCSPGIWQLDCTHLEGKIILVAVHVASGYMEAEVIPAETGQETAYYILKLAGRWPVKVIHTDNGSNFTSAAVKAACWWAGIQQEFGIPYNPQSQGVVESMNKELKKIIGQIRDQAEHLKTAVQMAVFIHNFKRKGGIGGYSAGERIIDIIATDIQTKELQKQIIKIQNFRVYYRDSRDPIWKGPAKLLWKGEGAVVIQDNSDIKVVPRRKVKIIKDYGKQMAGADCVAGRQDED

SEQ ID NO: 805 - protein, 1011 aa, Artificial
  HIV Pol
FFRENLAFPQGEAREFPPEQARAISPTSREPQARAISPTSREPQVRRDNSRFEAGVEREGTLNFPQITLWQRPLVSIKIEGQIREALLDTGADDTVLEEITLSGRWKPKMIGGIGGFIKVRQYDQILIEICGKKAIGTVLVGPTPVNIIGRNMLTQLGCTLNFPISPIETVPVKLKPGMDGPKVKQWPLTEEKIQALTAICEEMEKEGKITKIGPENPYNTPVFAIKKKDSTKWRKLVDFRELNKRTQDFWEVQLGIPHPAGLKKKKSVTVLDVGDAYFSVPLDEGFRKYTAFTIPSINNETPGIRYQYNVLSQGWKGSPAIFQSSMTRILEPFRAQNPELVIYQYMDDLYVGSDLEIGQHRAKIEELRAHLLKWGLTTPDKKHQKEPPFLWMGYELHPDKWTVQPIQLPEKDSWTVNDIQKLVGKLNWASQIYPGIKVRQLCKLLRGTKALTDIVPLTEEAELELAENREILREPVHGVYYDPSKDLVAEIQKQGQDQWTYQIYQEPFKNLKTGKYAKMRTAHTNDVKQLAEAVQKIATESIVIWGKTPKFRLPIQRETWETWWTNYWQATWIPEWEFVNTPPLVKLWYQLEKEPIAGAETFYVDGAANRETKLGKAGYVTDRGRQKIVSLTETTNQKTELQAIHLALQDSGSEVNIVTDSQYAFGIIQAQPDKSESELVNQIIEQLINKERVYLSWVPAHKGIGGNEQVDKLVSSGIRKALFLDGIDKAQEEHEKYHSNWRAMASEFNLPPIVAKEIVASCDKCQLKGEAMHGQVDCSPGIWQLDCTHLEGKVILVAVHVASGYIEAEVIPAETGQDTAYYILKLAGRWPVKVIHTDNGSNFTSTAVKAACWWADIQQEFGIPYNPQSQGVVESMNKELKKIIGQVRDQAEHLKTAVQMAVFIHNFKRRGGIGGYSAGERIIDIIATDIQTKELQKQIIKIQNFRVYYRDSRDPIWKGPAKLLWKGEGAVVIQDNGDIKVVPRRKVKIIKDYGKQMAGADCVAGRQDED

SEQ ID NO: 806 - protein, 998 aa, Artificial
  HIV Pol
FFRENLAFSEGEARELPSEQARAISPTSRELQVRGDNPRSEAGAERQGTLNLPQITLWQRPLVSIKVGGQIKEALLDTGADDTVLEDINLPGKWKPKMIGGIGGFIKVRQYDQIVIEICGKKAIGSVLVGPTPVNIIGRNMLTQLGCTLNFPISPIETVPVKLKPGMDGPKVKQWPLTEEKIKALKAICEEMEKEGKITKIGPKNPYNTPIFAIKKKDSTKWRKLVDFKELNKRTQDFWEVQLGIPHPAGLKKKKSVTVLDVGDAYFSVPLDRDFRKYTAFTIPSINNETPGIRYQYNVLPQGWKGSPAIFQSSMTKILEPFRAQNPEIVIYQYMDNLYVRSDLEIGQHRAKIEELREHLLKWGFTTPDKKHQKEPPFLWMGYELHPDKWTVQPIQLPEKDSWTVNDIQKLVGKLNWASQIYAGIKVRQLCKLLRGAKALTDIVPLTEEAELELAENRKILKEPVHGVYYDPSKDLIAEIQKQGHEQWTYQIYQEPFKNLKTGKYAKKRSAHTNDVKQLTDAVQKIAMESIVIWGKTPKFRLPIQKETWDTWWTDYWQATIPEWEFVNAPPLVKLWYQLEKDPIAGAETFYVDGAANRETKLGKAGYVTDKGRQKVVSLTETTNQKTELQAIKLALQDSGSEVNIVTDSQYALGIIQAQPDDSESELVNQIIEQLIKKDKVYLSWVPAHKGIGGNEQVDKLVSSGIRKVLFLDGIDKAQEEHERYHSNWRAMANEFNLPPIVAKEIVASCDKCQLKGEAMHGQVDCSPGIWQLDCTHLEGKVILVAVHVASGYIEAEVIPAETGQEAAYFILKLAGRWPVQIIHTDNGSNFTSAAVKAACWWAGIQQEFGIPYNPQSQGVVKSMNKELKKIIGQVRDQAEHLKTAVLMAVFIHNFKRKGGIGGYSAGERIVDIIASDIQTKELQKQITKIQNFRVYYRDSREPVWKGPAKLLWKGEGAVVIQDNSDIKVVPRRKAKIIRDYGKQMAGADCVAGRQDED

SEQ ID NO: 807 - protein, 1007 aa, Artificial
  HIV Pol
FFRENLAFPQGKAGEFPPEQTRANSPSSTSANSPTSRELQVRGNNPLSEAGGERQGTLNFPQITLWQRPLVSIKVGGQIKEALLDTGADDTVLEEINLPGKWKPKMIGGIGGFIKVRQYDQIPIEICGKKAIGTVLVGPTPVNIIGRNMLTQLGCTLNFPISPIETVPVKLKPGMDGPKVKQWPLTEEKIKALTAICEEMEKEGKITKIGPENPYNTPVFAIKKKDSTKWRKLVDFRELNKRTQDFWEVQLGIPHPAGLKKKKSVTVLDVGDAYFSVPLDEDFRKYTAFTIPSINNETPGIRYQYNVLPQGWKGSPAIFQSSMTKILEPFRAKNPEIVIYQYMDDLYVGSDLEIGQHREKIEELREHLLKWGFTTPDKKHQKEPPFLWMGYELHPDKWTVQPIQLPEKDSWTVNDIQKLVGKLNWASQIYPGVKVKQLCKLLRGTKALTDIVPLTEEAELELAENREILKEPVHGVYYDPSKDLIAEIQKQGHDQWTYQIYQEPFKNLKTGKYAKMRTAHTNDVKQLTEAVQKIAMESIVIWGKTPKFRLPIQKETWEAWWTDYWQATWIPEWEFVNTPPLVKLWYQLEKEPIIGIETFYVDGAANRETKLGKAGYVTDRGRQKIVSLAETTNQKAELQAIQLALQDSGSEVNIVTDSQYALGIIQAQPDKSESELVNQIIEQLINKERIYLSWVPAHKGIGGNEQVDKLVSSGIRKVLFLDGIDKAQEEHEKYHSSWRAMANEFNLPPIVAKEIVASCDKCQLKGEATHGQVDCSPGIWQLDCTHLEGKIILVAVHVASGYIEAEVIPAETGQETAYYILKLAGRWPVKIIHTDNGSNFTSAAVKAACWWAGIQQEFGIPYNPQSQGVVESMNKELKKIIGQIRDQAEHLKTAVQMAVFIHNFKRKGGIGGYSAGERIVDIIATDIQTRELQKQIIKIQNFRVYYRDSRDPIWKGPAKLLWKGEGAVVIQDNSDIKVVPRRKVKIIRDYGKQMAGADCVAGRQDED

SEQ ID NO: 808 - protein, 1000 aa, Artificial
  HIV Pol
FFRENLAFPQGEAREFPSEQARAISPTSRELQVRGDNPRSEAGAERQGTLNLPQITLWQRPLVTIKVGGQVKEALLDTGADDTVLEEISLPGKWKPKMIGGIGGFIKVRQYDQISIEICGKRAIGTVLVGPTPVNIIGRNMLTQLGCTLNFPISPIETVPVKLKPGMDGPKVKQWPLTEEKIKALTAICEEMEKEGKITKIGPENPYNTPVFAIKKKDSTKWRKLVDFRELNKRTQDFWEVQLGIPHPAGLKKKKSVTVLDVGDAYFSVPLDESFRKYTAFTIPSRNNETPGIRYQYNVLPQGWKGSPAIFQSTMTKILEPFRAQNPEIVIYQYMDDLYVGSDLEIGQHRAKIEELRDHLLKWGFTTPDKKHQKEPPFLWMGYELHPDKWTVQTIQLPTKESWTVNDIQKLVGKLNWASQIYSGIKVKQLCKLLRGTKALTDIVPLTEEAELELAENREILKEPVHGVYYDPSKDLIAEIQKQGHDQWTYQIYQEPFKNLKTGKYAKMRTAHTNDVRQLTEAVQKIAMESVVIWGKTPKFRLPIQKETWETWWADYWQATWIPEWEFVNTPPLVKLWYQLEKEPIVGAETFYVDGAANRETKAGKAGYVTDRGRQKVISITETTNQKTELQAIQLALQDSGSEVNIVTDSQYALGIIQAQPDKSESELVNQIIEQLINKERVYLSWVPAHKGIGGNEQVDKLVSNGIRKVLFLDGIDKAQEEHEKYHSNWRAMASEFNLPPVVAKEIVASCDKCQLKGEAIHGQVDCSPGIWQLDCTHLEGKVILVAVHVASGYIEAEVIPAETGQETAYYILKLAGRWPVKIIHTDNGSNFTSAAVKAACWWAGIQQEFGIPYNPQSQGVVESMNKELKKIIGQVRDQAEHHKTAVQMAVFVHNFKRKGGIGGYSAGERIIDIIATDIQTKELQKQITKIQNFRVYYRDSRDPIWKGPAKLLWKGEGAVVIQDNSDIKVVPRRKAKIIRDYGKQMAGADCVAGRQDEDQ

SEQ ID NO: 809 - protein, 1000 aa, Artificial
  HIV Pol
FFRENLAFPQGEAREFPSEQTRANSPTTRELQVRGNNPRSEAGAERQGNLNFPQITLWQRPLVSIKVGGQVKEALLDTGADDTVLEELALPGRWKPKMIGGIGGFIKVRQYDQIPIEICGKKAIGTVLVGPTPVNIIGRNMLTQLGCTLNFPISPIETVPVKLKPGMDGPKVKQWPLTEEKIKALTAICEEMEKEGKITKIGPENPYNTPVFAIKKKDSTKWRKLVDFRELNKRTQDFWEVQLGIPHPAGLKKKKSVTVLDVGDAYFSVPLDESFRKYTAFTIPSINNETPGVRYQYNVLPQGWKGSPAIFQSSMTKILEPFRAQNPEIVIYQYMDDLYVGSDLEIGQHRAKIEELRNHLLKWGFTTPDKKHQKEPPFLWMGYELHPDKWTVQPIQLPEKDSWTVNDIQKLVGKLNWASQIYPGIKVKQLCKLLRGAKALTDIVPLTEEAELELAENREILKEPVHGVYYDPSKELIAELQKQGNDQWTYQIYQEPFKNLKTGKYAKMRTAHTNDVKQLTEAVQKIAMESIVIWGKTPKFRLPIQKETWETWWTDYWQATWIPEWEFVNTPPLVKLWYQLEKEPIAGAETFYVDGAANRDTKKGKAGYVTDRGRQKIVSLTETTNQRTELQAIQLALQDSGLEVNIVTDSQYALGIIQAQPDKSESELVNQIIEELIKKERVYLSWVPAHKGIGGNEQVDKLVSSGIRKVLFLDGIDKAQGGSEKYHSNWRAMASEFNLPPIVAKEIVASCDKCQLKGEAIHGQVDCSPGIWQLDCTHLEGKIILVAVHVASGYIEAEVIPTETGQETAYLILKLAGRWPVKIIHTDNGSNFTSTTVKAACWWAGIQQEFGIPYNPQSQGVVESMNKELKKIIGQVRDQAEHLKTAVQMAVFIHNFKRKGGIGGYSAGERIIDIIATDIQTKELQKQITKIQNFRVYYRDSRDPIWKGPAKLLWKGEGAVVIQDNSDIKVVPRRKVKIIKDYGKQMAGADCVAGRQDEDQ

SEQ ID NO: 810 - protein, 999 aa, Artificial
  HIV Pol
FFRENLAFPQGEAREFPSEQTRANSPTSRELQVRGDNPRSEAGAERQGTLNFPQITLWQRPLVSIKVGGQIKEALLDTGADDTVLEEINLPGKWKPKMIGGIGGFIKVRQYDQISIEICGKKAIGAVLVGPTPVNIIGRNMLTQLGCTLNFPISPIETVPVKLKPGMDGPKVKQWPLTEEKIKALTAICEEMEKEGKITKIGPENPYNTPVFAIKKKDSTKWRKLVDFGELNKRTQDFWEVQLGIPHPAGLKKKKSVTVLDVGDAYFSVPLDEDFRKYTAFTIPSINNEAPGIRYQYNVLPQGWKGSPSIFQSSMTKILEPFRTQNPEIVIYQYMDDLYVGSDLEIGQHRAKIEGLREHLLKWGFTTPDKKHQKEPPFLWMGYELHPDKWTVQPIKLPDKDSWTVNDIQKLVGKLNWASQIYPGIKVRQLCKLLRGAKALTDIVPLTEEAELELAENREILKEPVHGVYYDPSKDLIAEIQKQGHDQWTYQIYQEPFKNLKTGKYAKMRTAHTNDVKQLTEAVQKIALESIVIWGKIPKFRLPIQKETWETWWTDYWQATWIPEWEFVNTPPLVKLWYQLEKEPIAGVETFYVDGAANRETKIGKAGYVTDRGRQKIVSLTETTNQKTELQAIQLALQDSGSEVNIVTDSQYALGIIQAQPDKSESELVNQIIEQLIKKERVYLSWVPAHKGIGGNEQVDKLVSKGIRKVLFLDGIDKAQEEHEKYHNNWRAMASDFNLPPVVAKEIVASCDKCQLKGEAIHGQVDCSPGIWQLDCTHLEGKVIIVAVHVASGYIEAEVIPAETGQETAYYILKLAGRWPVKVIHTDNGSNFTSAAVKAACWWAGVQQEFGIPYNPQSQGVVESMNKELKKIIGQVRDQAEHLKTAVQMAVFIHNFKRKGGIGGYSAGERIIDIIATDIQTKELQKQIIKIQNFRVYYRDSRDPIWKGPAKLLWKGEGAVVIQDNNDIKVVPRRKVKIIKGYGKQMAGADCVAGGQDEN

SEQ ID NO: 811 - protein, 1006 aa, Artificial
  HIV Pol
FFRENLAFPEGGEAREFPAEQTSREQTRANSPTSRELQVRGDNPCSEAGDERQGTFNFPQITLWQRPLVTIKVGGQIKEALLDTGADDTVLEDINLPGKWKPKMIGGIGGFIKVRQYDQILIEICGKKAIGSVLVGPTPVNIIGRNMLTQLGCTLNFPISPIETVPVKLKPGMDGPKVKQWPLTEEKIKALTAICEEMEKEGKITKIGPENPYNTPVFAIKKKDSTKWRKLVDFRELNKRTQDFWEVQLGIPHPAGLKKKKSLTVLDVGDAYFSVPLHENFRKYTAFTIPSINNETPGIRYQYNVLPQGWKGSPAIFQSSMTKILGPFRTQNPDIVIYQYMDDLYVGSDLEIGKHRAKIEELRNHLLRWGFTTPDKKHQKEPPFLWMGYELHPDKWTVQPIVLPEKDSWTVNDIQKLVGKLNWASQIYPGIKVRQLCKLLRGAKALTDIVPLTEEAELELAENREILKEPVHGVYYDPSKDLKAEIQKQGNDQWTYQIYQEPFKNLKTGKYAKMRTAHTNDVKQLTEAVQKIALESIVIWGKVPKSRLPIQKETWETWWTDYWQATWIPEWEFVNTPPLVKLWYQLEKEPIVGAETYYVDGAANRETKMGRAGYVTDRGKQKVISLTETTNQKTELQAIQLALQDSGSEVNIVTDSQYALGIIQAQPDKSESELVNQIIEQLINKERVYLSWVPAHKGIGGNEQVDKLVSNGIRKVLFLDGIDKAQEDHEKYHSNWRAMANEFNLPPIVAKEIVASCDKCQLKGEAIHGQVDCSPGIWQLDCTHLEGKIILVAVHVASGYIEAEVIPAETGQETAYFILKLAGRWPVKIIHTDNGSNFTSATVKAACWWAGIQQEFGIPYNPQSQGVVESMNKELKKIIGQVREQAEHLKTAVQMAVFIHNFKRKGGIGGYSAGERIIDIIATDIQTRELQKQIIKIQNFRVYYGDSRDPIWKGPAKLLWKGEGAVVIQDNSDIKVVPRRKVKIIKDYGKQMAGADCMAGRQDEDQ

SEQ ID NO: 812 - protein, 1000 aa, Artificial
  HIV Pol
FFRENLAFPQGEAREFPSEQTRANSPTSRELQVRGDNPLSEAGAERQGTLNFPQITLWQRPLVSIKVGGQIKEALLDTGADDTVLEDINLPGKWKPKMIGGIGGFIKVRQYDHIPIEICGKRAIGTVLVGPTPVNIIGRNMLTQLGCILNFPISPIETVPVKLKPGMDGPKVKQWPLTEEKIKALTAICEDMEKEGKITKIGPENPYNTPVFAIKKKDSTKWRKLVDFRELNKRTQDFWEVQLGIPHPAGLKKKKSVTVLDVGDAYFSIPLDEGFRKYTAFTIPSINNATPGIRYQYNVLPQGWKGSPAIFQSSMTRILEPFRTQNPEIVIYQYMDDLYVGSDLEIGQHRAKIEKLREHLLKWGLTTPDKKHQKEPPFLWMGYELHPDKWTVQPIVLPEKDSWTVNDIQKLVGKLNWASQIYPGIKVTQLCKLLRGAKALTDIVPLTDEAELELAENREILKEPVHGVYYDPSKDLIAEIQKQGHDQWTYQIYQEPFKNLKTGKYAKRRTAHTNDVKQLTEAVQKIALESIVIWGKIPKFRLPIQKETWETWWTDYWQATWIPEWEFVNTPPLVKLWYQLEKEPVAGVETFYVDGAANRETKMGKAGYVTDRGRQKIISLTETTNQKAELHAIQLALQDSGPEVNIVTDSQYALGIIQAQPDKSESELVSQIIEQLINKERVYLSWVPAHKGIGGNEQVDKLVSSGIRKVLFLDGIDKAQEEHEKYHSNWRAMANEFNLPPIVAKEIVASCDKCQLKGEAIHGQVDCSPGIWQLDCTHLEGKIVLVAVHVASGYLEAEVIPTETGQETAYYILKLAGRWPVKVIHTDNGSNFTSAAVKAACWWAGIQQEFGIPYNPQSQGVVESMNKELKKIIGQVRDQAEHLKTAVQMAVFIHNFKRKGGIGGYSAGERIIDIIATDIQTRELQKQIIKIQNFRVYYRDNRDPIWKGPAKLLWKGEGAVVLQDNSEIKVVPRRKVKIIRDYGKQMAGADCVAGRQDEDQ

SEQ ID NO: 813 - protein, 1004 aa, Artificial
  HIV Pol
FFRENLAFPQGEAREFPSEQARANSPTRANSPTSRELQVRGDNPRFEAGEKRQGNLNFPQITLWQRPLVTIKVGGQTKEALLDTGADDTVLEEMNLPGKWKPKMIGGIGGFIKVRQYDEILIEICGKKAIGTVLVGPTPVNIIGRNMLTQLGCTLNFPISPIETVPVKLKPGMDGPKVKQWPLTEEKIKALTAICEEMEKEGKITKIGPENPYNTPVFAIKKKDSTKWRKLVDFRELNKRTQDFWEVQLGIPHPAGLKKKKSVTVLDVGDAYFSVPLDEGFRKYTAFTIPSINNETPGIRYQYNVLPQGWKGSPAIFQSSMTKILEPFRAQNPEIVIYQYMDDLYVGSDLEIGQHRAKIEELREHLLKWGFTTPDKKHQKEPPFLWMGYELHPDKWTVQPIQLPEKDSTVNDIQKLVGKLNWASQIYSGIKVRQLCKLLRGTKALTDIVPLTDEAELELAENREILKEPVHGAYYDPSKDLIAEIQKQGHDQWTYQIYQEPFKNLKTGKYAKMRSAHTNDVKQLTEAVQKIAMECIVIWGKTPKFRLPIQKETWETWWTDYWQATWIPEWEFVNTPPLVKLWYQLEEEPIAGAETFYVDGAANRETKIGKAGYVTDKGRQKTVSLTETTNQKTELQAIQLALQDSGSEVNIVTDSQYALGIIQAQPDKSESELVNQIIEQLIRKERVYLSWVPAHKGIGGNERVDKLVSSGIRKVLFLDGIDKAQEEHEKYHSNWRAMASEFNLPPVVAKEIVASCDECQLKGEAMHGQVDCSPGIWQLDCTHLEGKIILVAVHVASGYIEAEVIPAETGQETAYFLLKLAGRWPVKVIHTDNGSNFTSNAMKAACWWAGIQQEFGIPYNPQSQGVVESMNKELKKIIGQVRDQAEHLKTAVQMAVFIHNFKRRGGIGGYSAGERIIDIIATDIQTKELQKQIIKIQNFRVYYRDSRDPIWKGPAKLLWKGEGAVVIQDNSDIKVVPRRKVKIIRDYGKQMAGADCVAGGQDEN

SEQ ID NO: 814 - protein, 999 aa, Artificial
  HIV Pol
FFRENLAFPQGKAREFSPEQARANSPTSRELQVRGDDPRSEAGAERQGTLNFPQITLWQRPLVSIKVGGQIKEALLDTGADDTVLEEISLPGKWKPKMIGGIGGFIKVRQYDQILIEICGKKAIGTVLVGPTPVNIIGRNMLTQLGCTLNFPISPIETVPVKLKPGMDGPKVKQWPLTEEKIKALTAICEEMEKEGKITKIGPENPYNTPVFAIKKKDSTKWKKLVDFRELNKRTQDFWEVQLGIPHPAGLKKKKSVTVLDVGDAYFSVPLDEGFRKYTAFTIPSINNETPGIRYQYNVLPQGWKGSPAIFQSSMTRILEPFRTQNPEIVIYQYMDDLYVESDLEIGQHRAKIEELKDHLLKWGFTTPDKKHQKEPPFLWMGYELHPDKWTVQPIQLPEKDSWTVNDIQKLVGKLNWASQIYAGIKVKQLCKLLRGAKALTDIVPLTEEAELELAENREILKEPVHEVYYDPSKDLIAEIQKQGHDQWTYQIYQEPFKNLKTGKYAKMRTAHTNDVKQLTEAVQKIAMESIVIWGKAPKFRLPIQKETWETWWTDYWQATWIPEWEFVNTPPLVKLWYQLEKEPIVGAETFYVDGAAHRETKVEKAGYVTDRGRQKIVNLTETTNQKTELQAIQLALQDSGSEVNIVTDSQYALGIIQAQPDKSESELVNQIIEQLIKKERVYLSWVPAHKGIGENEQVDKLVSSGIRKVLFLDGIDKAQEEHEKYHSNWRAMANEFNLPPIVAKEIVASCDKCQLKGEAIHGQVDCSPGIWQLDCTHLEGKIILVAVHVASGYMEAEVIPAETGQETAYYILKLAGRWPVKVIHTDNGSNFTSAAVKAACWWAGIQQEFGIPYNPQSQGVVESMNKELKKIIGQVRDQAEHLKTAVQMAVFIHNFKRKGGIGGYSAGERIIDIIATDIQTRELQKQIIKIQNFRVYYRDSRDPIWKGPAKLLWKGEGAVVIQDNSDIKVVPRRKAKIIRDYGKQMAGADCVASRQDED

SEQ ID NO: 815 - protein, 999 aa, Artificial
  HIV Pol
FFRENLAFPQGEAREFPPEQTRADSPTSRELQVRGDNPRSEAGAEGQGTLNFPQITLWQRPLVSIKVGGQIKEALLDTGADDTVLEEINLPGKWKPKMIGGIGGFIKVRQYDQILIEICGKRAMGTVLVGPTPVNIIGRNLLTQLGCTLNFPISPIKTVPVKLKPGMDGPKVKQWPLTEEKIKALTAICEEMEKEGKITKIGPENPYNTPVFAIKKKDSTKWRKLVDFRELNKRTQDFWEVQLGIPHPAGLKKKKSVTVLDVGDAYFSVPLDEDFRKYTAFTIPSINNETPGIRYQYNVLPQGWKGSPAIFQSSMTKILEPFRAQNPEIVIYQYMDDLYVGSDLKIGQHRAKIEELREHLLKWGFTTPDKKHQKEPPFLWMGYELHPDKWTVQPIQLPEKEDWTVNDIQKLVGKLNWASQIYKGIKVKQLCKLLRGAKALTDIVPLPEEAELELAENREILKEPVHGVYYDPSKDLIAEVQKQGDDQWTYQIYQEPLKNLKTGKYAKMRTAHTNDVKQLTEVVQKICIESVVIWGRTPKFRLPIQRETWETWWTDYWQATWIPEWEFVNTPPLVKLWYQLEKEPMMGVETFYVDGAANRETKIGKAGYVTDRGRQKVVTLTETTNQKTELQAIRLALQDSGPEVNIVTDSQYALGITQAQPDKSESELVNQIIEQLIKKEKVYLSWVPAHKGIGGNEQVDKLVSNGIRKVLFLDGIDKAQEEHEKYHSNWRAMASEFNLPPVVAKEIVASCDKCQLKGEAIHGQVDCSPGIWQLDCTHLEGKIILVAVHVASGYIEAEVTPEETGQETAYYILKLAGRWPVKIIHTDNGRNFTSAAVKAACWWAGIQQEFGIPYNPQSQGVVESMNKELKKIIGQVRDQAEHLKTAVQMAVFIHNFKRKGGIGGYSAGERIIDIIATDIQTRELQKQIIKIQNFRVYYRDSRDPIWKGPAKLLWKGEGAVVIQDKSDIKVVPRRKVKIIRDYGKQMAGADCVADRQDED

SEQ ID NO: 816 - protein, 999 aa, Artificial
  HIV Pol
FFRENLAFPQGEAREFPSEQARANSSTSRELQVRGDNPCSEAGAERQGTLNFPQITLWQRPLVSIKVGGQIKEALLDTGADDTVLEEINLPGKWKPKMIGGIGGFIKVRQYDQITIEICGKKAIGAVLVGPTPVNIIGRNMLTQLGCTLNFPISPIETVPVKLKPGMDGPKVKQWPLTEEKIKALKEICTEMEKEGKITKIGPENPYNTPIFAIKKKDSTKWRKLVDFGELNKRTQDFWEVQLGIPHPAGLKKKKSVTVLDVGDAYFSVPLDEDFRKYTAFTIPSINNETPGIRYQYNVLPQGWKGSPAIFQSSMTKILEPFRAQNPDIVIYQYMDDLYVGSDLEIGQHRAKIEELREHLLRWGFTTPDKKHQKEPPFLWMGYELHPDKWTVQPIILPEQESWTVNDIQKLVGKLNWASQIYAGIKVKQLCKLLRGTKALTDIVPLTEEAELELAENREILKEPVHGVYYDPSKELIAEIQKQGQDQWSYQIYQEPFKNLKTGKYAKKRSAHTNDVKQLTEAVQKIAMESIVIWGKTPKFRLPIQKETWDTWWTDYWQATWIPEWEFVNTPPLVKLWYQLEKEPIVGAETFYVDGAANRETKLGKAGYVTDKGRQKVITLTETTNQKTELQAIQLALQDSGSEVNIVTDSQYALGIIQAQPDKSESELVNQIIEELIKKERVYLSWVPAHKGIGGNEQVDKLVSSGIRKVLFLDGIDKAQEEHEKYHSNWRAMASEFNLPPVVAKEIVASCDKCQLKGEAMHGQVDCSPGIWQLDCTHLEGKIILVAVHVASGYIEAEVIPAETGQETAYYILKLAGRWPVKVIHTDNGSNFTSTAVKAACWWAGIQQEFGIPYNPQSQGVVESMNKELKKIIGQVRDQAEHLKTAVQMAVFIHNFKRKGGIGGYSAGERIIDIIATDIQTKELQKQITNIQKFRVYYRDSRDPIWKGPAKLLWKGEGAVVIQDNSDVKVVPRRKAKIIRDYGKQMAGADCVADRQDED

SEQ ID NO: 817 - protein, 1003 aa, Artificial
  HIV Pol
FFRENLAFQQGKAREFPSEQNSPTRRANSPTSRELQVRGDNPRSEAGAERQGTLNFPQITLWQRPLVSIKVGGQIKEALLDTGADDTVLEEMSLPGKWKPKMIGGIGGFIKVRQYDQIPIEICGKKAIGTVLIGPTPVNIIGRNMLTQLGCTLNFPISPIETVPVRLKPGMDGPKVKQWPLTEEKIKALTAICEEMEKEGKITKIGPENPYNTPVFAIKKKDSTKWRKLVDFRELNKRTQDFWEVQLGIPHPAGLKKKKSVTVLDVGDAYFSVPLDENFRKYTAFTIPSINNETPGIRYQYNVLPQGWKGSPAIFQSSMTKILEPFRAKNPELVIYQYMDDLYVGSDLEIGQHRARIEELRKHLLRWGFTTPDKKHQKEPPFLWMGYELHPDKWTVQPIKLPEKESWTVNGIQKLVGKLNWASQIYPGIKVKQLCKLLRGAKALTDIVPLTEEAEVELAENREILRGPVHGVYYDPSKDLVAEIQKQGHDQWTYQIFQEPFKNLKTGKYAKMRTAHTNDVKQLTEAVQKIAMESIVIWGKTPKFRLPIQKETWETWWTDYWQATWIPEWEFVNTPPLVKLWYQLEKEPIIGAETFYVDGAANRETKLGKAGYVTDRGRQKIISLTETTNQKTELQAIQLALQDSGSEVNIVTDSQYALGIIQAQPDKSESELVNQIIEQLIKKERVYLSWVPAHKGIGGNEQVDKLVSRGIRKVLFLDGIDKAQEEHEKYHSNWRAMASEFNLPPIVAKEIVASCDKCQLKGEAIHGQVDCSPGIWQLDCTHLEGKIIIVAAHVASGYIEAEVIPAETGQETAYFILKLAGRWPVKVIHTDNGSNFTSAAVKAACWWAGIQQEFGIPYNPQSQGVVESMNKELKKIIGQVRDQAEHLKTAVQMAVFIHNFKRKGGIGGYSAGERIIDIIATDIQTKELQKQITKIQNFRVYYRDSRDPIWKGPAKLLWKGEGAVVIQDNSDIKVVPRRKVKIIKDYGKQMAGADCVAGRQDED

SEQ ID NO: 818 - protein, 997 aa, Artificial
  HIV Pol
FFRENLAFPQGEAREFPSEQTRANSPTSRKLRGDNPCSEAGDERQGTLNFPQITPWQRPLVSIKVGGQIKEALLDTGADDTVLEDINLLGKWKPKMIGGIGGFIKVRQYDQIPIEICGKKAIGTVLVGPTPVNIIGRNMLTQLGCTLNFPISPIETVPVKLKPGMDGPKVKQWPLTEEKIKALTGICEEMEKEGKITKIGPENPYNTPVFAIKKKDSTKWRKLVDFRELNKRTQDFWEVQLGIPHPAGLKKKKSVTVLDVGDAYFSVPLDEGFRKYTAFTIPSINNETPGIRYQYNVLPQGWKGSPAIFQSSMTKILEPFRAKNPDIVIYQYMDDLYVGSDLDIGQRREKIEDLRNHLLKWGFTTPDKKHQKEPPFLWMGYELHPDKWTVQPIQLPEKESWTVNDIQKLVGKLNWASQIYPGIKVTQLCKLLRGAKALTDIVPLTEAAELELAENREILREPVHGVYYDPSKDLVAEIQKQGNDQWTYQIYQEPFKNLKTGKYAKRRTAHTNGVKQLTEAVQKIAQESIVIWGKTPKFRLPIQKETWETWWTDYWQATWIPEWEFVNTPPLVKLWYQLEKDPILGVETFYVDGAANRETKMGKAGYVTDRGRQKVVSLTGTTNQKTELQAIQLALQDSGSEVNIVTDSQYALGIIQAQPDKSESELVNQIIEQLIKKERVYLSWVPAHKGIGGNEQVDKLVSSGIRKVLFLDGIDKAQEDHERYHSNWRTMASEFNLPPIVAKEIVASCDKCQLKGEAIHGQVDCSPGIWQLDCTHLEGKIILVAVHVASGYVEAEVIPAETGQETAYFILKLAGRWPVKIIHTDNGSNFTSAAVKAACWWAGIQQEFGIPYNPQSQGVVESMNKELKKIIGQVRDQAEHLKTAVQMAVFIHNFKRKGGIGGYSAGERIIDIIATDIQTRELQKQIIKIQNFRVYYRDSRDPIWKGPAKLLWKGEGAVVIQDNSDIKVVPRRKVKIIKDYGKQMAGADCVAGRQDED

SEQ ID NO: 819 - protein, 1007 aa, Artificial
  HIV Pol
FFRENLAFPQGGEAGEFPSEQTRANSPTSRANSPTSRELQVRGDNPSIKAGPERQGALNFPQITLWQRPLVSIKIEGQIKEALLDTGADDTVLEEMNLPGRWKPKMIGGIGGFIKVRQYDQILIEICGKKAIGTVLIGPTPVNIIGRNMLTQLGCTLNFPISPIETVPVKLKPGMDGPKVKQWPLTEEKIKALTAICEEMEKEGKITKIGPENPYNTPVFAIKKKDSTKWRKLVDFRELNKRTQDFWEVQLGIPHPAGLKKKKSVTVLDVGDAYFSVPLDESFRKYTAFTIPSTNNETPGIRYQYNVLPQGWKGSPAIFQCSMTKILEPFRAQNPEIVIYQYMDDLYVGSDLEIGQHRAKIEELRGHLLQWGFTTPDKKHQKEPPFLWMGYELHPDKWTVQPIQLPEKDSWTVNDIQKLVGKLNWASQIYPGIKVKQLCKLLRGTKALTDIVPLTEEAELELAENREILKEPVHGVYYDPSKDLIAEIQKQGHDQWTYQIYQEPFKNLKTGKYAKMRTAHTNDVKQLTEAVQKIAIESIVIWGKTPKFRLPIQKETWETWWTDYWQATWIPEWEFVNTPPLVKLWYQLEKEPIAGAETFYVDGAANRETKIGKAGYVTDKGRQKIVCLNETTNQKAELHAIQLALQDSGLEVNIVTDSQYALGIIQAQPDKSESELVNQIIEQLINKEKIYLSWVPAHKGIGGNEQVDKLVSNGVRRVLFLDGIDKAQEDHEKYHSNWRAMANEFNLPPIVAKEIVASCDKCQLKGEAIHGQVDCSPGIWQLDCTHLEGKIILVAVHVASGYIEAEVIPAETGQETAYYILKLAGRWPVKVIHTDNGSNFTSAAVKAACWWAGIQQEFGIPYNPQSQGVVESMNKELKKIIGQVRDQAEHLKTAVQMAVFIHNFKRKGGIGGYSAGERIIDIIATDIQTKELQKQIIKIQNFRVYYRDSRDPIWKGPAKLLWKGEGAVVIQDNSDIKVVPRRKVKIIKDYGKQMAGADCVAGRQDED

SEQ ID NO: 820 - protein, 1006 aa, Artificial
  HIV Pol
FFGENLAFPQGEAREFPPEQARTNSPQAGAISPTSRELQVRGDNPRSEAGAERQGSLNFPQITLWQRPLVSIKVGGQIKEALLDTGADDTVLEEINLPGKWKPKMIGGIGGFIKVRQYDQVVIEICGKKTIGTVLVGPTPVNIVGRNLLTQLGCTLNFPISPIETVPVKLKPGMDGPKVKQWPLTEEKIKALTAICEEMEKEGKIEKIGPENPYNTPVFAIKKKDSTKWRKLVDFRELNKRTQDFWEVQLGIPHPAGLKKKKSVTVLDVGDAYFSVPLDESFRKYTAFTIPSINNETPGIRYQYNVLPQGWKGSPAIFQSSMTKILEPFRARNPEIVIYQYMDDLYVGSDLEIGQHRAKIEELREHLLKWGFTTPDKKHQKEPPFLWMGYELHPDKGTVQPIQLPEKDSWTVNDIQKLVGKLNWASQIYPGIKVRQLCKLLRGAKALTDIVPLTEEAELELAENREILKEPVHGVYYDPSKDLIAEIQKQGNDQWTYQIYQEPFKNLKTGKYAKMRTAHTNDVKQLTEAVQKIALESIVIWGKTPKFRLPIQKETWETWWTDYWQATWIPEWEFVNTPPLVKLWYQLEKEPIAGVETFYVDGAVNRETKVGKAGYVTDRGRQKVISINETTNQKTELQAIQLALQDSGSEVNIVTDSQYALGIIQAQPDKSESELVNQIIEQLIKKDRVYLSWVPAHKGIGGNEQVDKLVSSGIRKVLFLNGIDKAQEEHEKYHSNWRAMANEFNLPPVVAKEIVASCDKCQLKGEATHGQVDCSPGIWQLDCTHLEGKIILVAVHVASGYIEAEVIPAETGQETAYFILKLAGRWPVKVIHTDNGSNFTSAAVKAACWWAGIQQEFGIPYNPQSQGVVESMNKELKKIIGQVRDQAEHLKTAVQMAVFIHNFKRKGGIGGYSAGERIIDIIATDIQTKELQKRIIQIQNFRVYYRDSRDPIWKGPAKLLWKGEGAVVIQDNSDIKVVPRRKAKIIKDYGKQMAGADCVASRQDED

SEQ ID NO: 821 - protein, 1010 aa, Artificial
  HIV Pol
FFRENLAFQQGEAREFPSEQTRTNSPTSREQTRANSPTSGELQVRGDNTRSEAGAKKQGTLNFPQITLWQRPLVSIKIGDQVKEALLDTGADDTVLEEIKLPGKWKPKMIGGIGGFIKVRQYDEIPIEICGKKAIGTVLVGPTPVNIIGRNMLTQLGCTLNFPISPIETVPLKLKPGMDGPKVNQWPLTEEKIKALTAICEEMEKEGKITKIGPENPYNTPVFAIKKKDSTKWRKLVDFRELNKRTQDFWKVQLGIPHPAGLKKKKSVTVLDVGDAYFSVPLDEGFRKYTAFTIPSINNETPGIRYQYNVLPQGWKGSPSIFQSSMTKILKPFRAQNPEIVIYQYMDDLYVGSDLEIGQHRAKIQELRDHLLKWGFTTPDKKHQKEPPFLWMGYELHPDKWTVQPIQLPEKDSWTVNDIQKLVGKLNWASQIYPGIKVRQLCKLLRGTKALTDIIPLTEEAELELAENREILKEPVHGVYYDSSKELIAEIQKQGHGQWTYQIYQEPFKNLKTGKYAKMRTAHTNDVKQSTEAVQKIAMESIVIWGRTPKFRLPIQKEMWEARWTDYWQATWIPEWEFVNTPPLVKLWYQLEKEPIVGAETFYVDGAANRETKKGKAGYVTDKGRQKVVSLTETTNQKTELQAIQLALQDSGSEVNIVTDSQYALGIIQAQPDKSESELVNQIIEQLIKKERVYLSWVPAHKGIGGNEQVDKLVSNGIRKVLFLDGIDKAQEEHEKYHSNWRAMASEFNLPPIVAKEIVASCDKCQLKGEAIHGQVDCSPGIWQLDCTHLEGKIILVAVHVASGYIEAEVIPAETGQETAYYILKLAGRWPVKVIHTDNGSNFTSAAVKAACWWAGIQQEFGIPYSPQSQGVVESMNKELKKIIGQVRDQAEHLKTAVQMAVFIHNFKRKGGIGGYSAGERIIDIIATDIQTKELQKQIIKIQNFRVYYRDSRDPIWKGPAKLLWKGEGAVVLQDNSDIKVVPRRKVKIIKDYGKQMAGADCVAGGQDEN

SEQ ID NO: 822 - protein, 1005 aa, Artificial
  HIV Pol
FFRETLAFQQGKARELPSEQDRANSPTRANSPTGRQLQVRGDNPRAEAGAERQGTLNFPQITLWQRPLVSIKVGGQIREALLDTGADDTVLEEINLPGKWKPKMIGGIGGFIKVRQYDQILIEICGKKAIGTVLIGPTPVNIIGRNMLTQLGCTLNFPISPIETVPVKLKPGMDGPKVKQWPLTEEKIKALMEICAEMEKEGKITKIGPDNPYNTPVFAIKKKDSTKWRKLVDFRELNKRTQDFWEVQLGIPHPAGLKKKKSVTVLDVGDAYFSVPLDEGFRKYTAFTIPSINNETPGIRYQYNVLPQGWKGSPAIFQSSMTRILEPFRAQNPDIVIYQYMDDLYVGSDLEIGQHRAKIEELREHLLKWGFTTPDKKHQKEPPFLWMGYELHPDKWTVQPIQLPEKDSWTVNDIQKLVGKLNWVSQIYPGIKVRQLCKLLRGAKALTDIVPLTEEAELELAENREILKEPVHGVYYDPSEDLIAEIQKQGHDQWTYQIYQEPFKNLKTGKYAKMRTAHTNDVKQLTEAVQKIALESIVIWGKTPKFRLPIQKETWETWWTDYWQATWIPEWEFVNTPPLVKLWYQLEKEPIAGAETFYVDGAANRETKIGKAGYVTDRGRQKIVSLSETTNQKTELQAIQLALQDSGSEVNIVTDSQYALGIIQAQPDKSESELVNQIIEQLIKKEKVYLSWVPAHKGIGGNEQVDKLVSKGIRKVLFLDGIDKAQEEHEKYHNNWRAMASDFNLPPIVAKEIVASCDKCQLKGEAIHGQVDCSPGIWQLDCTHLEGKVILVAVHVASGYMEAEVIPAETGQETAYFILKLAGRWPVKVIHTDNGSNFTSTTVKAACWWAGIQQEFGIPYNPQSQGVVESMNKELKKIIGQVRDQAEHLKTAVQMAVFIHNFKRRGGIGGYSAGERIIDIIATDIQTKELQKQITKIQNFRVYYRDSRDPIWKGPAKLLWKGEGAVVIQDNSDIKVVPRRKVKIIKDYGKQMAGADCVAGRQDED

SEQ ID NO: 823 - protein, 1002 aa, Artificial
  HIV Pol
FFRENLAFPQGEAREFPPKQARTNSPNSPTSRELQVRGDNPRSEAGDERQGALNFPQITLWQRPLVSIKVGGQIKEALLDTGADDTVLEDINLSGKWKPKMIGGIGGFIKVRQYEQVPIEICGKKAIGTVLVGPTPANIIGRNLLTQLGCTLNFPISPIETVPVKLKPGMDGPKVKQWPLTEEKIKALTEICKEMEKEGKIEKIGPENPYNTPVFAIKKKDSTKWRKLVDFRELNKRTQDFWEVQLGIPHPAGLKQKKSVTVLDVGDAYFSVPLDKDFRKYTAFTIPSINNETPGIRYQYNVLPQGWKGSPAIFQCSMTKILEPFRAKNPEIVIYQYMDDLYVGSDLEIGQHRAKIEELRGHLLRWGFTTPDKKHQKEPPFLWMGYELHPDKWTVQPIQLPEKDSWTVNDIQKLVGKLNWASQIYPGIKVRQLCKLLRGAKALTDIVPLTEEAELELAENREILKEPVHGVYYDPSKDLIAEIQKQGHDQWTYQIYQEPFKNLKTGKYAKMKSAHTNDVKQLTEAVQKIVMESIVIWGKAPKFRLPVQKETWETWWTDYWQATWIPEWEFVNTPPLVKLWYQLEKEPIAGVETFYVDGAANRDTKVGKAGYVTDRGRQKIVSINGTTNQKTELRAIYLALQDSGSEVNIVTDSQYALGIIQAQPDKSESEIVNQIIEQLIQKDRVYLSWVPAHKGIGGNEQVDKLVSSGIRKVLFLDGIDKAQEDHEKYHNNWRAMVSEFNLPPIVAKEIVASCDKCQLKGEATHGQVDCSPGIWQLDCTHLEGKIILVAIHVASGYMEAEVTPAETGQETAYFILKLAGRWPVKVIHTDNGSNFTSNAVKAACWWAGIQQEFGIPYNPQSQGVVESMNKELKKIIGQVRDQAEHLKTAVQMAVFIHNFKRKGGIGGYSAGERIIDIIATDIQTRELQKQIIQIQNFRVYYRDSRDPIWKGPAKLLWKGEGAVVIQDNGDIKVVPRRKAKIIKDYGKQMAGADCVASRQDEN

SEQ ID NO: 824 - protein, 1009 aa, Artificial
  HIV Pol
  misc_feature (534)..(534): Xaa can be any naturally occurring amino acid
FFREDLAFPRRKAREFPSEQNRANSPTRANSPTSRELQVRGDNPRSEAGAERQGTLQGTLNFPQITLWQRPLVTIKVGGQIKEALLDTGADDTVLEEMNMPGKWKPKMIGGIGGFIKVRQYDQIVIEICGKKAIGTVLIGPTPVNIIGRNMLTQLGCTLNFPISPIETVPVKLKPGMDGPKVKQWPLTEEKIKALTEICEDMEREGKISKIGPENPYNTPVFAIKKKDSTKWRKLVDFRELNKRTQDFWEVQLGIPHPAGLKKKKSVTVLDVGDAYFSVPLDEDFRKYTAFTIPSINNETPGIRYQYNVLPQGWKGSPAIFQSSMTKILEPFRAKNPDIVIYQYMDDLYVGSDLEIGQHRAKIEELRAHLLKWGFTTPDKKHQKEPPFLWMGYELHPDKWTVQPIKLPEKESWTVNDIQKLVGKLNWASQIYPGIKVKQLCKLLRGTKALTDIIPLTEEAELELAENREILREPVHGVYYDPSKDLVAEIQKQGHDQWTYQIYQEPFKNLKTGKYAKMRTAHTNDVKQLTEAVXKIAMECIVIWGKTPKFRLPIQKETWETWWTDYWQATWIPDWEFVNTLPLVKLWYQLEKEPIIGAETFYVDGAANRDTKIGKAGYVTDRGRQKVVSLTETTNQKTELQAIQLALQDSGSEVNIVTDSQYALGIIQAQPDKSESELVNQIIEQLIKKERVYLSWVPAHKGIGGNEQVDKLVSSGIRKVLFLDGIDKAQEEHEKYHSNWRAMASEFNLPPIVAKEIVASCDKCQLKGEAMHGQVDCSPGIWQLDCTHLEGKIILVAVHVASGYIEAEVIPAETGQETAYYILKLAGRWPVKVIHTDNGSNFTSAAVKAACWWAGIQQEFGIPYNPQSQGVVESMNKELKKIIGQIRDQAEHLKTAVQMAVFIHNFKRKGGIGGYSAGERIIDIIATDIQTKELQNQITKIQNFRVYYRDSRDPIWKGPAKLLWKGEGAVVIQDNSDIKVVPRRKVKIIKDYGKQMAGADCVAGRQDED

SEQ ID NO: 825 - protein, 999 aa, Artificial
  HIV Pol
FFRENLAFPQGEAREFPSEQTRANSPTSRKLQVRGDNPRSEAGADRQGTLNFPQITLWQRPLVTIKVGGQVKEALLDTGADDTVLEEINLPGKWKPKMIGGIGGFIKVRQYEQIPIEICGKKAIGTVLVGPTPVNIIGRNMLTQLGCTLNFPISPIETVPVKLKPGMDGPKVKQRPLTEEKIKALTAICEEMEKEGKITKIGPENPYNTPVFAIKKKDSTKWRKLVDFRELNKRTQDFWEVQLGIPHPAGLKKKKSVTVLDVGDAYFSVPLDESFRKYTAFTIPSINNETPGIRYQYNVLPQGWKGSPAIFQSSMTRILEPFRTQNPEIVIYQYMDDLYVGSDLEIGQHRAKIEELRDHLLKWGFTTPDKKHQKEPPFLWMGYELHPDKWTVQKIQLPTKDSWTVNDLQKLVGKLNWASQIYPGIKVKQLCKLLRGTKALTDIVPLTEEAELELAENREILKEPVHGVYYDPSKDLIAEIQKQGNDQWTYQIYQEPFKNLKTGKYAKMRNAHTNDVKQLTEAVQKIAQESIVIWGKTPKFRLPIQKETWETWWTDYWQATWIPEWEFVNTPPLVKLWYQLEKEPIVGAETFYVDGAANRETKAGKAGYVTDRGRQKVISLTETTNQKTELQAIQLALQDSGSEVNIVTDSQYALGIIQAQPDKSESELVNQIIEELIKKERVYLSWVPAHKGIGGNEQVDKLVSSGIRKVLFLDGIDKAQEEHEKYHSNWRAMASEFNLPPIVAKEIVASCDKCQLKGEATHRQVDCSPGIWQLDCTHLEGKVILVAVHVASGYIEAEVIPAETGQETAYYILKLAGRWPVKVIHTDNGSNFTSTVVKAACWWAGIQQEFGIPYNPQSQGVVESMNKELKKIIGQVRDQAEHLKTAVQMAVFIHNFKRKGGIGGYSAGERIIDIIATDIQTKELQKQITKIQNFRAYYRDSRDPIWKGPAKLLWKGEGAVVIQDNSDIKVVPRRKAKIIKDYGKQMAGADCVAGRQDED

SEQ ID NO: 826 - protein, 1000 aa, Artificial
  HIV Pol
  misc_feature (459)..(459): Xaa can be any naturally occurring amino acid
FFRENLAFPQGKAREFPSKQARANSPTGRELQVRGDNPHSEAGAERQGTLNFPQITLWQRPLVSIKVGGQIKEALLDTGADDTVLEEISLPGKWKPKMIGGIGGFIKVRQYDQILVEICGKKAIGTVSVGPTPVNIIGRNMLTQLGCTLNFPISPIETVPVKLKPGMDGPKVKQWPLTEEKIKALTAICEEMEKEGKITKIGPENPYNTPVFAIKKKDSTKWRKLVDFRELNKRTQDFWEVQLGIPHPAGLKKKKSVTVLDVGDAYFSVPLDKDFRKYTAFTIPSINNETPGIRYQYNVLPQGWKGSPAVFQSSMTKILEPFRVQNPEIVVYQYMDDLYVGSDLEIGQHRAKIEELREHLLKWGFTTPDKKHQKEPPFLWMGYELHPDKWTVQPIKLPEKESWTVNDIQKLVGKLNWASQIYPGIKVRHLCRLLRGAKALTEIVPLTEEAELELAENRXEILKEPVHGVYYDPSKDLIAEIQKQGYDQWTYQIYQEPYKNLKTGKYARMRSAHTNDVKQLAEAVQRIAKESIVIWGKTPKFRLPIQKETWETWWTDYWQATWIPDWEFVNTPPLVKLWYQLEKEPIVRAETFYVDGAANRETKIGKAGYVTDRGRQKIVSLTETTNQKSELQAIHLALQDSGSEVNIVTDSQYALGIIQAQPDKSESELVNQIIEQLIKKEKVYLSWVPAHKGIGGNEQVDKLVSSGIRKVLFLDGIDKAQEEHEKYHSNWRAMASEFNLPPIVAKEIVASCDKCQQKGEAIHGQVDCSPGIWQLDCTHLEGKIILVAVHVASGYIEAEVIPAETGQETAYYILKLAGRWPVKVIHTDNGSNFTSSAVKAACWWAGTQQGFGIPYNPQSQGVVESMNKELKKIIGQVRDQAEHLKTAVQMAVFIHNFKRKGGIGGYSAGERIIDIIATDIQTKELQNQITKIQNFRVYYRDSRDPIWKGPAKLLWKGEGAVVIQDNSDIKVVPRRKAKIIKNYGKQMAGADCVAGRQDED

SEQ ID NO: 827 - protein, 1006 aa, Artificial
  HIV Pol
FFRENLAFPQGEAREFPSEQTRANSPTSRANSPTSRELQVRGDNPRSEAGAERQGSLNFPQITLWQRPLVSIKVGGQIKEALLDIGADDTVLEELSLPGKWKPKMIGGIGGFIKVRQYDQIPIEICGKKAIGTVLVGPTPVNIIGRNMLTQLGCTLNFPISPIETVPVKLKPGMDGPKVKQWPLTEEKIKALTAICEEMEKEGKITKIGPENPYNTPVFAIKKKDSTKWRKLVDFRELNKRTQDFWEVQLGIPHPAGLKKKKSVTVLDVGDAYFSVPLDESFRKYTAFTIPSTNNETPGIRYQYNVLPQGWKGSPAIFQCSMTKILEPFRAQNPEIVIYQYMDDLYVGSDLEIGQHRAKIEELREHLLKWGFTTPDKKHQKEPPFLWMGYELHPDKWTVQPIQLPEKDSWTVNDIQKLVGKLNWASQIYTGIKVRQLCKLLRGAKALTDIVPLTEEAELELAENREILKGPVHGVYYDPSKDLIAEIQKQGQGQWTYQIYQEPFKNLKTGKYAKMRTAHTNDVKQLTEAVQKIAMESIVIWGKTPKFRLPIQKETWEIWWTDYWQATWIPEWEFVNTPPLVKLRYQLEKEPIAGVETFYVDGAANRETKVGKAGYVTDRGRQKVITLTETTNQKAELQAIQLALQDSGSEANIVTDSQYALGIIQAQPDKSESELVNQIIEQLIKKEGVYLSWVPAHKGIGGNEQVDKLVSKGIRKVLFLDGIDKAQEEHEKYHSNWRAMASEFNLPPIVAKEIVASCDKCQLKGEAIHGQVDCSPGIWQLDCTHLEGKTILVAVHVASGYIEAEVIPAETGQETAYYILKLAGRWPVKVIHTDNGSNFTSAAVKAACWWAGIQQEFGIPYNPQSQGVVGSMNKELKKIIGQVRDQAEHLKTAVQMAVFIHNFKRKGGIGGYSAGERIIDIIATDIQTKELQNQIIKIQNFRVYYRDSRDPIWKGPAKLLWKGEGAVVIQDKGDIKVVPRRKAKIIKDYGKQMAGADCVAGRQDED

SEQ ID NO: 828 - protein, 998 aa, Artificial
  HIV Pol
FFRENLAFPQGEAREFSSEQARANSPTSRELQVRGDNPRSEAGAERQGTLNFPQITLWQRPLVTVKVGGQIKEALLDTGADDTVLEEISLPGKWKPKMIGGIGGFIKVRQYDQIAIEICGKKAIGTVLVGPTPVNIIGRNMLTQLGCTLNFPISPIETVPVKLKPGMDGPKVKQWPLTEEKIKALTAICEEMEKEGKITKIGPENPYNTPVFAIKKKDSTKWRKLVDFRELNKRTQDFWEVQLGIPHPAGLKKKKSVTVLDVGDAYFSVPLDEGFRKYTAFTIPSINNETPGIRYQYNVLPQGWKGSPAIFQSSMTRILEPFRAQNPGIVIYQYMDDLYVGSNLEIGQHRAKIEELREHLLRWGFTTPDKKHQKEPPFLWMGYELHPDKWAVQPIQLPEKDSWTVNDIQKLVGKLNWASQIYAGIKVRQLCKLLRGAKALTDIVPLTEEAELELAENREILKEPVHGVYYDPSKDLIAEIQKQGNGQTYQIYQEPFKNLKTGKYAKIRTAHTNDVKQLTEVVQKIAQESIVIWGKTPKFRLPIQKETWEIWWTEYWQATWIPEWEFVNTPPLVKLWYQLEKDPIAEVETFYVDGAANRETKRGKAGYVTDRGRQKIVSLTETTNQKAELQAIQLALQDSGSEVNIVTDSQYALGIIQSQPGKSESELVNQKIEQLIKKERVYLSWVPAHKGIGGNEQVDKLVSKGIRKVLFLDGIDKAQEEHEKYHSNWRAMASEFNLPPVVAKEIVASCDKCQLKGEAIHGQVDCSPGIWQLDCTHLEGKVILVAVHVASGYIEAEVIPAETGQETAYYILKLAGRWPVKVIHTDNGSNFTSNAVKAACWWAGIQQEFGIPYNPQSQGVVESMNKELKKIIGQVRDQAEHLKTAVQMAVFIHNFKRKGGIGGYSAGGRIIDIIATDIQTKELQKQIIKIQNFRVYYRDSRDPIWKGPAKLLWKGEGAVVIQDNSDIKVVPRRKVKIIRDYGKQMAGDDCVAGRQDED

SEQ ID NO: 829 - protein, 999 aa, Artificial
  HIV Pol
  misc_feature (317)..(317): Xaa can be any naturally occurring amino acid
FFREILAFPEGEAWEFPSEQIRANSPTSRELQVRGDNPRSETGAEGQGTFNFPQITLWQRPLVSIKVGGQIKEALLDTGADDTVLEEINLPGKWKPKMIGGIGGFIKVRQYDQILIEICGKKAIGTVLVGPTPVNIIGRNMLTQLGCTLNFPISPIETVPVKLKPGMDGPKVKQWPLTKEKIEALTAICEEMEKEGKITKIGPENPYNTPVFAIKKKDSTKWRKLVDFRELNKRTQDFWEVQLGIPHPAGLKKKKSVTVLDVGDAYFSVPLDEGFRKYTAFTIPSINNETPGIRYQYNVLPQGWKGSPAIFQSSMTXILEPFRARNPDIVIYQYMDDLYVGSDLEIGQHRAKIEELREHLLKWGFTTPDKKHQKEPPFLWMGYELHPDKWTVQPIQLPEKDSWTVNDIQKLVGKLNWASQIYPGIKVKQLCKLLRGTKALTDIVPLTEEAELELAENREILREPVHGVYYDPSKDLIAEIQKQGNDQWTYQIYQEPFKNLKTGKYAKRRTAHTNDVRQLAEAVQKITMESIVIWGKTPRFRLPVQKETWETWWTDYWQATWIPEWEFVNTPPLVKLWYQLEKEPMAGVETFYVDGAANRETKIGRAGYVTDRGRQKIITLNETTNQKTELQAIKLALQDSGSEVNIVTDSQYALGIIQAQPDTSESELVNQIIEQLIKKEKVYLSWVPAHKGIGGNEQVDKLVSSGIRKVLFLDGIDKAQEEHEKYHSNWRAMASEFNLPPIVAKEIVASCDKCQLKGEAMHGQVDCSPGIWQLDCTHLEGKIILVAVHVASGYIEAEVIPAETGQETAYYILKLAGRWPVKVIHTDNGSNFTSTAVKAACWWAGIKQEFGIPYNPQSQGVVESMNKELKKIIGQVRDQAEHLKTAVQMAVFIHNFKRRGGIGGYSAGERIIDIIATDIQTKELQKQIIKIQNFRVYYRDSRDPIWKGPAKLLWKGEGAVVIQDNSDIKVVPRRRAKIIRDYGKQMAGADCVADRQDED

SEQ ID NO: 830 - protein, 1005 aa, Artificial
  HIV Pol
FFRENLAFQQGEARELPPEQTRTNSPTNANSPTSRELQVRGDNPRSEAGDEREGTLNFPQITLWQRPLVSIKVGGQIKEALLDTGADDTVLEDINLPGKWKPKMIGGIGGFIKVRQYDQIMIEICGQKAIGTVLVGPTPVNIIGRNMLTQLGCTLNFPISPIETVPVKLKPGMDGPKVKQWPLTEEKIKALTAICEEMEKEGKITKIGPENPYNTPVSAIKKKDSTKWRKLVDFRELNKRTQDFWEVQLGIPHPVGLKKKKSVTVLDVGDAYFSVPLDENFRKYTAFTIPSVNNETPGIRYQYNVLPQGWKGSPAIFQSSMTKILEPFRAKNPEIVIYQYMDDLYVGSDLEIVQHRAKVEELRKHLLRWGFTTPDKKHQKEPPFLWMGYELHPDKWTVQPIQLPEKDSWTVNDIQKLVGKLNWASQIYPGIKVRQLCKLLRGAKALTDIVPLTEEAELELAENREILREPVHGVYYDPSKDLIAEIQKQGDDQWTYQIYQEPFKNLKTGKYAKIRTAHTNDVRQLTEAVQKIALESIVIWGKIPKFRLPIQKETWETWWTDYWQATWIPEWEFVNTPPLVKLWYQLEKEPVAGVETFYVDGAANRETKIGKAGYVTDRGRQKIVSLTETTNQKTELQAIQLALQDSGSEVNIVTDSQYALGIIQAQPDKSESELVNQIIEQLIKKERIYLSWVPAHKGIGGNEQIDKLVSSGIRKVLFLDGIDKAQEEHEKYHSNWRSMASDFNLPPIVAKEIVASCDKCQLKGEAMHGQVDCSPGVWQLDCTHLEGKIILVAVHVASGYIEAEVIPAETGQETVYFILKLAGRWPVKAIHTDNGSNFTSAAVKAACWWAGINQEFGIPYNPQSQGVVESMNKELKKIIGQVREQAEHLKTAVQMAVFIHNFKRKGEIGGYSAGERIIDIIATDIQTKELQKQITKIQNFRVYYRDSRDPIWKGPAKLLWKGEGAVVIQDNSDIKAVPRRKAKIIKDYGQQMAGADCVAGRQDEN

SEQ ID NO: 831 - protein, 999 aa, Artificial
  HIV Pol
  misc_feature (537)..(537): Xaa can be any naturally occurring amino acid
FFRENLAFPQGKAREFPSEQTRAISPTSRELQVRGDNPRSEAGAEGQGALNLPQITLWQRPLVTIRVGGQIKEALLDTGADDTVLEEINLPGKWKPKMIGGIGGFIKVRQYDQILIEICGKKAIGTVLVGPTPVNIIGRNMLTQLGCTLNFPISPIETVPVKLKPGMDGPKVKQWPLAEEKIKALTAICEEMEKEGKITKIGPENPYNTPVFAIKKKDSTKWRKLVDFRELNKRTQDFWEVQLGIPHPAGLKKKKSVTVLDVGDAYFSVPLDEGFRKYTAFTIPSINNETPGIRYQYNVLPQGWKGSPAIFQSSMTKILEPFRALNPEIVIYQYMDDLYVGSDLEIGQHRAKIEELREHLLKWGFTTPDKKHQKEPPFLWMGYELHPDKWTVQPINLPEKESWTVNDIQKLVGKLNWASQIYPGIKVRQLCKLLRGAKALTDIVPLTEEAELELAENREILKEPVHGVYYDPSKDLIAEIQKQGHDQWTYQIYQEPFKNLKTGKYAKMRTAHTNDVKQLTEAVQKIATESIVIWGKXPKFRLPIQKETWETWWTDYWQATWIPEWEFVNTPPLVKLWYQLEKEPIVGAETFYVDGAANRETKIGKAGYVTDRGRQRIISLTEATNQKTELQAIQLALQDSGSEVNIVTDSQYALGIIQAQPDKSESELVNQMIEQLIKKERVYLSWVPAHKGIGGNEQVDKLVSSGIRKVLFLDGIDKAQEEHEKYHNNWRAMASEFNLPPIVAKEIVASCDKCQLKGEAMHGQVDCSPGIWQLDCTHLEGKVILVAVHVASGYMEAEVIPAETGQETAYYILKLAGRWPVKVIHTDNGTNFTSAAVKAACWWAGIQQEFGIPYNPQSQGVVESMNKELKKIIGQVREQAEHLKTAVQMAVFIHNFKRRGGIGGYSAGERIIDIIATDIRTKELQKQIMKIRNFRVYYRDSRDPIWRGPAKLLWKGEGAVVIQDNSDIKVVPRRKVKIIKDYGKQMAGADCVAGRQDED

SEQ ID NO: 832 - protein, 999 aa, Artificial
  HIV Pol
FFRENLAFPQGEAREFPSEQTRANSPTSRELQVRGDNPRSETRVEGQGNFNFPQITLWQRPLVSIKVGGQIREALLDTGADDTVLEDINLPGKWKPKMIGGIGGFIKVRQYEQILIEICGKKTIGTVLVGPTPVDIIGRNMLTQLGCTLNFPISPIETVPVKLKPGMDGPKVKQWPLTEEKIKALTAICEDMEKEGKITKIGPENPYNTPVFAIKKKDSTKWRKLLDFRELNKRTQDFWEVQLGIPHPAGLKKKKSVAVLDVGDAYFSVPLDESFRKYTAFTIPSINNSTPGIRYQYNVLPQGWNGSPAIFQSSMTKILEPFRTKNPDILIYQYMDDLYVGSDLQIGQHRAKLEELTEHLLIWGLTTPDKKHQKEPPFLWMGYELHPDKWTVQPIQLPDKDSWTVNDIQKLVGKLNWASQIYPGIRVRHLCKLLRGAKALTDIVPLTEEAELELAENREILKEPVHGVYYDPSEDLIAEVQKQGHYQWTYQIYQEPFKNLKTGKYAKMRTAHTNDVKQLTEVVQKIAMESIVIWGKTPKFRLPIQKDTWETWWTDYWQATWIPEWEFVNTPPLVKLWYQLEKEPIAGAETFYVDGAANRETKLGKAGYVTNKGRQKIVPLTETTNQKAELQAIQLALQDSGSEVNIVTDSQYALGIIQAQPDKSESELVTQIIEQLIKKERIYLSWVPAHKGIGGNEQVDKLVSSGIRKVLFLDGIDKAQEEHEKYHCNWRAMASDFNLPPVVAKEIVASCDKCQLKGEAMHGQVDCSPGIWQLDCTHLEGKIILVAVHVASGYIEAEVIPAETGQETAYYILKLAGRWPVKVIHTDNGSNFTSTAVKAACWWAGIQQEFGIPYNPQSQGVVESMNKELEKIIGQVREQAEHLKTAVQMAVFIHNFKRKGRIGGYSAGERIIDIIATDIQTKELQKQIIKIQNFRVYYRDSRDPVWKGPAKLLWKGEGAVVIQDNSDIKVVPRRKVKIIRDYGKQMAGDDCVAGRQDED

SEQ ID NO: 833 - protein, 1009 aa, Artificial
  HIV Pol
FFRENLAFPQGEAREFPPEQIRASSPNSTNSPTSRELQVRGDNPRSEAGAEGQGTLQGTLNCPQITLWQRPLVSIKVGGQIKEALLDTGADNTVLEEINLPGKWKPKMIGGIGGFIKVRQYDQIVIEICGKKAIGTVLVGPTPVNIIGRNMLTQLGCTLNFPISPIETVPVKLKPGMDGPKVKQWTLTEEKIKALTEICEEMEKEGKITKIGPENPYNTPVFAIKKKDSTKWRKLVDFRELNKRTQDFWEVQLGIPHPAGLKKKKSVTVLDMGDAYFSVPLDEGFRKYTAFTIPSINNETPGIRYQYNVLPQGWKGSPAIFQSSMTKILEPFRLQNPEIVIYQYMDDLYVGSDLEIGQRRAQIEELREHLLKWGFTTPDKKHQKEPPFLWMGYELHPDKWTVQPIQLPDKDSWTVNDIQKLVGKLNWASQIYPGIKVRQLCKLLRGAKALTDVVPLTEEAELELAENREILKEPVHGVYYDPSKDLIAEIQKQGHDQWTYQIYQEPFKNLKTGKYAKMRTAHTNDVKQLTEAVQKIAQESIVIWGKTPKFRLPIQKETWETWWTDYWQATWIPEWEFVNTPPLVKLWYQLEKEPIPGVETFYVDGAANRETKLGKAGYVTDRGRQKIVSLTETTNQKTELQAIQLALQDSGSEVNIVTDSQYALGIIQAQPDKSESELVNQIIEQLIQKEWVYLSWVPAHKGIGGNEQVDKLVSQGIRKMLFLDGIDKAQEEHEKYHNNWRAMADEFNLPPIVAKEIVASCDKCQLKGEAIHGQVDCSPGIWQLDCTHLEGKVILVAVHVASGYMEAEVIPAETGQETAYFILKLAGRWPVRVIHTDNGTNFTSAAVKAACWWAGIQQEFGIPYNPQSQGVVESMNKELKKIIGQVRDQAEHLKTAVQMAVFIHNFKRKGGIGGYSAGERIIDIIATDIQTKELQKQIIKIQNFRVYYRDSRDPIWKGPAKLLWKGEGAVVIQDNSDIKVVPRRKAKIIKDYGKQMAGADCVAGGQDEN

SEQ ID NO: 834 - protein, 1000 aa, Artificial
  HIV Pol
FFRENLAFPQRGEAREFPSEQARANSPTSRELQIRGDNPRFEAGTKRQGTLNFPQITLWQRPLVSIKVGGQIKEALLDTGADDTVLEEMSLSGKWKPKMIGGIGGFIKVRQYDQIPIEICGKKAIGTVLIGPTPVNIIGRNMLTQLGCTLNFPISPIETVPVKLKPGMDGPKVKQWPLTEEKIKALTEICAEMEKEGKITKIGPENPYNTPVFAIKKKDSTKWRKLVDFRELNKRTQDFWEVQLGIPHPAGLKKKKSVTVLDVGDAYFSVPLDEGFRKYTAFTIPSINNETPGITYQYNVLPQGWKGSPAIFQSSMTRILEPFRTQNPEIVIYQYMDDLYVGSDLEIGQHRAKIEELRNHLLKWGFTTPDKKHQKEPPFLWMGYELHPDKWTVQPIQLPTKDSWTVNDIQKLVGKLNWASQIYPGIKVRQLCKLLRGTKALTDVVPLNEEAELELAENREILKEPVHGVYYDPSKDLIAEIQKQGQDQWTYQIYQEPFKNLKTGKYAKMRTAHTNDVKQLTEAVQKIAMESIVIWGKTPKFRLPIQKEIWETWWTDYWQATWIPEWEFVNTPPLVKLWYQLEKEPIMGAETFYVDGAANRETKAGKAGYVTDRGRQKVISLTETTNQKTELQAIQLALQDSGLEVNIVTDSQYALGIIQAQPDKSESELVNQIIEQLINKERVYLSWVPAHKGIGGNEQVDKLVSNGIRKVLFLDGIDKAQEEHERYHSNWRAMASEFNLPPIVAKEIVASCDKCQSKGEAMHGQVDCSPGIWQLDCTHLEGKVILVAVHVASGYIEAEVIPAETGQDTAYYILKLAGRWPVKVIHTDNGSNFTSAAVKAACWWAGIQQEFGIPYNPQSQGVVESMNKELKKIIGQVRDQAEHLKTAVQMAVFIHNFKRKGGIGGYSAGERIIDIIATDIQTKELQKQITNIQKFRVYYRDSRDPIWKGPAKLLWKGEGAVVIQDNSDIKVVPRRKVKIIKDYGKQMAGADCVASRQDED

SEQ ID NO: 835 - protein, 996 aa, Artificial
  HIV Pol
FFRENLAFPQGEAREFPSEQTGANSPTSRELRGNNPCSEAGDERQGTLNFPQITLWQRPLVSIKVGGQIKEALLDTGADDTVLEEINLPGKWRPKMIGGIGGFIKVRQYDQIPIEICGKKAIGTVLVGPTPVNIIGRNLLTQLGCTLNFPISPIETVPVKLKPGMDGPKVKQWPLTEEKIKALTAICEEMEKEGKITKIGPENPYNTPVFAIKKKDSTKWRKLVDFRELNKRTQDFWEVQLGIPHPAGLKKKKSVTVLDVGDAYFSVPLDESFRKYTAFTIPSINNETPGIRYQYNVLPQGWKGSPSIFQSSMTKILEPFRAKNPELVIYQYMDDLYVGSDLEIGQHRAKIEELRKHLLRWGFTTPDKKHQKEPPFLWMGYELHPDKWTVQSIKLPEKESWTVNDIQKLVGKLNWASQIYPGVKVRQLCKLLRGAKALTDIVPLTEEAELELAENREILKEPVHGVYYDPSKDLIAEIQKQGGDQWTYQIYQEPFKNLKTGKYAKMRTAHTNDVKQLTEAVQKISMESIVIWGKIPKFRLPIQKEAWEAWWTDYQATWIPEWEFVNTPPLVKLWYQLETEPMAGAETFYVDGAANRETKIGKAGYVTDKGRQKVVTLTETTNQKAELQAIQLALQDSGPEVNIVTDSQYALGIIQAQPDKSESELVNQIIEQLIKKEKVYLSWVPAHKGIGGNEKVDKLVSSGIRKVLFLDGIDKAQEEHEKYHSNWRAMASEFNLPPIVAKEIVASCDKCQLKGEAIHGQVDCSPGIWQLDCTHLEGKVILVAVHVASGYIEAEVIPAETGQETAYYILKLAGRWPVKIIHTDNGSNFTSAAVKAACWWAGIQQEFGIPYNPQSQGVVESMNKELKKIIGQVRDQAEYLKTAVQMAVFIHNFKRKGGIGGYSAGERIIDMIATDIQTRELQKQIIKIQNFRVYYRDSRDPIWKGPAKLLWKGEGAVVIQDNSDIKVVPRRKVKIIRDYGKQMAGADCVAGRQDED

SEQ ID NO: 836 - protein, 1000 aa, Artificial
  HIV Pol
FFRENLAFPQGEAREFPSEQTRAISPTSRELQVRGDNPCSEAGAEGQGTTFSFPQITLWQRPLVSIKVGGQIKEALLDTGADDTVLEDINLPGKWKPKMIGGIGGFIKVRQYDQIVIEICGKKAIGSVLVGPTPVNIIGRNMLTQLGCTLNFPISPIKTVPVKLKPGMDGPKVKQWPLTEEKIKALTEICEEMEKEGKVTKIGPENPYNTPVFAIKKKDSTKWRKLVDFRELNKRTQDFWEVQLGIPHPAGLKKKKSVTVLDVGDAYFSVPLDESFRKYTAFTIPSRNNETPGIRYQYNVLPQGWKGSPAIFQSSMTKILEPFRAQNPEIVIYQYMDDLYVGSDLEIGQHTAKIEELREHLLKWGFTTPDKKHQKEPPFLWMGYELHPDKWTVQPIQLPEKESWTVNDIQKLVGKLNWASQIYPGIKVRQLCKILRGVKALTDIVTLTEEAELELAENREILKEPVHGVYYDPSKDLIAEIQKQGHDQWTYQIYQEPFKNLKTGKYAKLRTAHTNDVRQLTEAVQKIAQECIVIWGKTPKFRLPIQKETWEAWWTDYWQATWIPEWEFVNTPPLVKLWYQLEKEPIAGVETFYVDGAANRETKMGKAGYVTDRGRQKIVSLNETTNQKTELQAIQLALQDSGSEVNIVTDSQYALGIIQAQPDKSESELVNQIIEQLICKERVYLSWVPAHKGIGGNEQVDKLVSSGIRKVLFLDGIDKAQEEHEKYHNNWRAMASDFNLPPIVAKEIVASCDKCQLKGEAMHGQVDCSPGIWQLDCTHLEGKIILVAVRVASGYIEAEVIPAETGQETAYFILKLAGRWPVKVIHTDNGSNFTSNAVKAACWWAGTQQEFGIPYNPQSQGVVESMNKELKKIIGQVRDQAEHLKTAVQMAVFIHNFKRKGGIGGYSAGERIIDIIATDIQTTELQKQIIKIQNFRVYYRDSRDPIWKGPAKLLWKGEGAVVIQDNSDIKVVPRRKVKIIKDYGKQMAGADCVAGRQDED

SEQ ID NO: 837 - protein, 1000 aa, Artificial
  HIV Pol
FFREDLAFPQGKAREFPSEQNRANSPTSRELQVRGDNPRSEAGAERQGTLNFPQITLWQRPLVSIKVGGQIKEALLDTGADDTVLEEMSLPGKWKPKMMGGIGGFIKVRQYDQILIEICGKKAIGTVLIGPTPVNIIGRNMLTQLGCTLNFPISPIETVPVKLKPGMDGPKVKQWPLTEEKIKALTAICEEMEKEGKITKIGPENPYNTPVFAIKKKDSTKWRKLVDFRELNKRTQDFWEVQLGIPHPAGLKKKKSVTVLDVGDAYFSVPLDEDFRKYTAFTIPSINNETPGIRYQYNVLPQGWKGSPSIFQSSMTKILEPFRARNPEIVIYQYMDDLYVGSDLEIGQHRAKIEELRKHLLRWGFTTPDKKHQKEPPFLWMGYELHPDKWTVQPIELPEKESWTVNDIQKLVGKLNWASQIYPGIKVRQLCKLLRGAKALTDIVPLTEEAELELAEDREILREPVHGVYYDPSKDLVAEIQKQGHDQWTYQIYQEPFKNLKTGKYAKMRTAHTNDVKQLTEAVQKIAMESIVIWGKTPKFRLPIQKETWETWWTDYWQATWIPEWEFVNTPPLVKLWYQLEKEPIIGAETFYVDGAANRETKIGKAGYVTDRGRQKIVSLTETTNQKTELQAIQLALQDSGSEVNIVTDSQYALGIIQAQPDKSESELVNQIIEQLIKKEKVYLSWVPAHKGIGGNEQIDKLVSKGIRKVLFLDGIDKAQEEHEKYHSNWRAMASEFNLPPIVAKEIVASCDKCQLKGEAIHGQVDCSPGIWQLDCTHLEGKIILVAVHVASGYIEAEVIPAETGQETAYYILKLAGRWPVKVIHTDNGSNFTSAAVKAACWWAGIQQEFGIPYNPQSQGVVESMNKELKKIIGQVRDQAEHLKTAVQMAVFIHNFKRKGGIGGYSAGERIIDIIATDIQTKELQKQITKIQNFRVYYRDSRDPIWKGPAKLIWKGEGAVVVIQDNSDIKVVPRRKVKIIRDYGKQMAGADCVAGRQDED

SEQ ID NO: 838 - protein, 999 aa, Artificial
  HIV Pol
FFRENLAFPQGEAREFPSEQTRANSPTSGELQVWGDNPRSETGAKGQGTFNFPQITLWQRPLVSIKVGGQVKEALLDTGADDTVLEEINLPGKWKPKMIGGIGGFIKVRQYDQITIEICGKKAIGTVLVGPTPVNIIGRNLLTQIGCTLNFPISPIETVPVKLKPGMDGPKVKQWPLTEEKIKALTAICEEMEKEGKITKIGPENPYNTPVFAIKKKDSTKWRKLVDFRELNKRTQDFWEVQLGIPHPAGLKKKKSVTVLDVGDAYFSVPLDESFRKYTAFTIPSINNATPGIRYQYNVLPQGWKGSPAIFQSSMTKILEPFRAQNPGIVIYQYMDDLYVGSDLEIGQHRAKIEELRTHLLKWGFTTPDKKHQKEPPFLWMGYELHPDKWTVQPIQLPDKDSWTVNDIQKLVGKLNWASQIYPGIKVRQLCKLLRGAKALTDIIPLTEEAELELAENREILKEPVHGVYYDPSKDLIAEIQKQGHDQWTYQIYQEPFKNLKTGKYAKMRTAHTNDVKQLAEAVQKITMESIVLWGKTPKFRLPIQKETWETWWTDYWQATWIPKWEFVNTPPLVKLWYQLEKEPIVGAETFYVDGAANRETKLGKAGCVTDRGRQKIVSLTETTNQKAELQAIQLALQDSGAEVNIVTDSQYALGIIQAQPDKSESELVNQIIEQLINKERIYLSWVPAHKGIGGHEQVDKLVSSGIRKVLFLDGIDKAQEDHEKYHSNWRAMASDFNLPPIVAKEIVASCDKCQLKGEAMHGQVDCSPGIWQLDCTHLEGKIILVAVHVASGYIEAEVIPAETGQETAYFILKLAGRWPVKVIHTDNGSNFTSATVKAACWWAGIQQEFGIPYNPQSQGVVESMNKELKKIIGQVRDQAEHLKTAVQMAVFIHNFKRKGGIGGYTAGERIIDIIATDIQTKELQKQIIKIQNFRVYYRDSRDPIWKGPAKLLWKGEGAVVLQDNSDIKVVPRRKVKIIKDYGKQMAGADCVAGGQDEN

SEQ ID NO: 839 - protein, 1000 aa, Artificial
  HIV Pol
  misc_feature (343)..(343): Xaa can be any naturally occurring amino acid
FFRENLAFPQGGEAREFPSEQARANSPTSRELQVRGDNPRSEAGAERQGTLNFLQITLWQRPLVSIKVGGQIREALLDTGADDAVLEDINLPGKWKPKMIGGIGGFIKVRQYDQIVIEICGKKAIGTVLVGPTPVNIIGRNMLTQLGCTLNFPISPIETIPVKLKPGMDGPKVKQWPLTEEKIKALKAICEEMEKEGKITKIGPENPYNTPIFAIKKKDSTKWRKLVDFRELNKRTQDFWEVQLGIPHPAGSKKKKSVTVLDVGDAYFSVPLDEDFRKYTAFTIPSINNETPGIRYQYNVLPQGWKGSPAIFQSSMTKILEPFRAQNPEIVIYQYMDDLYVGXDLEIGQHRAKIEELREHLLKWGFTTPDKKHQKEPPFLWMGYELHPDKWTVQPIQLPEKDSWTVNDIQKLVGKLNWASQIYAGIKVKQLCKLLRGAKALTDIVPLTEEAELELAENREILKEPVHGAYYDPSKDLIAEIQKQGNGQWTYQIYQEPFKNLKTGKYAKKKSTHTNDVKQLTDAVQKITMESIVIWGKTPKFRLPIQKETWDTWWTEYWQATWIPEWEFVNTPPLVKLWYQLEKDPIAGAETFYVDGAANRETKLGKAGYVTDKGRQKVVSLTETTNQKTELQAIKLALQDSGSEVNIVTDSQYALGIIQAQPDESESELVNQIIEQLIQKDKVYLSWVPAHKGIGGNEQVDKLVSSGIRKVLFLDGIDKAQEDHEKYHGNWRAMANEFNLPPIVAKEIVASCDKCQLKGEAMHGQVDCSPGMWQLDCTHLEGKVILVAVHVASGYIEAEVIPAETGQETADFILKLAGRWPVQIIHTDNGSNFTSTAVKAACWWAGIQQEFGIPYNPQSQGVVESMNKELKKIIGQVRDQAEHLKTAVLMAVFIHNFKRKGGIGGYSAGERIVDIIATDIQTKELQKQIIKIQNFRVYYRDSREPVWKGPAKLLWKGEGAVVIQDNSDIKVVPRRKAKIIRDYGKQMAGADCVAGRQDED

SEQ ID NO: 840 - protein, 1002 aa, Artificial
  HIV Pol
FFRENLAFPQGEAREFPSEQTRANSPTSRNLRGDNPCSEAGDERQGTLQGALNFPQITLWQRPLVSIKVGGQIKEALLDTGADDTVLEEVNLPGKWKPKMIGGIGGFIKVRQYDQIPIEICGKRAIGTVLVGPTPVNIIGRNMLTQLGCTLNFPISPIETVPVKLKPGMDGPKVKQWPLTEEKIKALTAICEEMEKEGKITKIGPENPYNTPVFAIKKKDSTKWRKLVDFRELNKRTQDFWEVQLGIPHPAGLKKKKSVTVLDVGDAYFSVPLDEGFRKYTAFTIPSINNETPGIRYQYNVLPQGWKGSPAIFQSSMTKILELFRAKNPEIVIYQYMDDLYVGSDLEIGQHRAKIEELREHLLKWGFTTPDKKHQKEPPFLWMGYELHPDQWTVQPIQLPEKESWTVNDIQKLVGKLNWASQIYPGIKVRQLCKLLRGAKALTDIVPLTDEAELELAENREILREPVHGVYYDPSKDLIAEIQKQGHDQWTYQIYQEPFKNLKTGKYAKRRTAHTNDVKQLTEAVQKIALESTVIWGKIPKFRLPIQKETWDTWWTDYWQATWIPEWEFVNTPPLVKLWYQLEKEPILGAETFYVDGAANRETKMGKAGYVTDRGRQKVVPLTETTNQKTELQAIQLALQDSGSEVNIVTDSQYALKIIQAQPDKSESELVNQIIEQLIKKDRVYLSWVPAHKGIGGNEQVDKLVSSGIRKVLFLDGIDKAQEEHERYHSNWRAMASEFNLPPIVAKEIVASCDKCQLKGEAIHGQVDCSPGIWQLDCTHLEGKIILVAVHVASGYMEAEVIPAETGQETAYFLLKLAGRWPVKIIHTDNGSNFTSAAVKAACWWAGIQQEFGIPYNPQSQGVVESMNKELKKIIGQVRDQAEHLKTAVQMAVFIHNFKRKGGIGGYSAGERIIDIIATDIQTRELQKQIIKIQNFRVYYRDNRDPIWKGPAKLLWKGEGAVVIQDNSEIKVVPRRKAKIIRDYGKQMAGADCVAGRQDEDQ

SEQ ID NO: 841 - protein, 1001 aa, Artificial
  HIV Pol
FFRENLAFPQGEAREFPPEQTRANSPTSRALQARTNSPTSREAGVEGQGTLNFPQITLWQRPLVSIKVGGQIKEALLDTGADDTVLEEINLPGKWKPKMIGGIGGFIKVRQYDQIPIEICGKKAIGTVLVGPTPVNIIGRNMLTQLGCTLNFPISPIETVPVKLKPGMDGPKVKQWPLTAEKIKALTEICEEMEKEGKITKIGPENPYNTPVFAIKKKDSTKWRKLVDFRELNKRTQDFWEVQLGIPHPAGLKKKKSVTVLDVGDAYFSVPLDEDFRKYTAFTIPSINNETPGIRYQYNVLPQGWKGSPAIFQASMIKILEPFRAQNPEMVIYQYMDDLYVGSDLEIGQHRAKIEELREHLLRWGFTTPDKKHQKEPPFLWMGYELHPDKWTVQPIQLAEKDSWTVNDVQKLVGKLNWASQIYPGIKVKQLCKLLRGAKALTDIVPLTEEAELELAENREILKEPVHGVYYDPSKELIAEIQKQGDDQWTYQIYQEPHKNLKTGKYAKMRTAHTNDVRQLTEAVQKIAMESIVIWGKTPKFRLPIQKETWETWWTDYWQATWIPEWEFVNTPPLVKLWYQLEKGPIAGAETFYVDGASNRETKLGKAGYVTDRGRQKVVSLNETTNQKTELQAIQLALQDSGTEVNIVTDSQYALGIIQAQPDKSESELVNQIIEQLIKKERVYLSWVPAHKGIGGNEQVDKLVSSGIRKILFLDGIDKAQEEHEKYHNNWRAMASEFNLPPIVAKEIVASCDKCQLKGEAMHGQVDCSPGIWQLDCTHLEGKVILVAVHVASGYMEAEVIPAETGQDTAYFLLKLAGRWPVKVIHTDNGSNFTSAAMKAACWWAGIQQEFGIPYNPQSQGVVESMNKELKKIIGQVRDQAEHLKTAVQMAVFIHNFKRKGGIGGYSAGERIIDIIATDIQTKELQKQITKIQNFRVYYRDSRDPIWKGPAKLLWKGEGAVVIQDNSDIKVVPRRKAKIIRDYGKQMAGADCVAGRQDEDQ

SEQ ID NO: 842 - protein, 999 aa, Artificial
  HIV Pol
FFRETLAFPQGEAREFSSEQGRANSPTSREPQARGDNTRFEAGDEGQGTLNFPQITLWQRPLVSIKIGGQIREALLDTGADDTVLEELSLPGRWKPKMIGGIGGFIKVRQYDQIPIEICGKKAIGTVLVGPTPVNIIGRNMLTQLGCTLNFPISPIETVPVKLKPGMDGPKVKQWPLTEEKIKALTAICEEMEKEGKITKIGPENPYNTSVFAIKKKDSTKWRKLVDFRELNKRTQDFWEVQLGIPHPAGLKKKKSVTVLDVGDAYFSVPLDEGFRKYTAFTIPSINNETPGIRYQYNVLPQGWKGSPAIFQSSMTRILEPFRAQNPEIVIYQYMDDLYVGSDLDIGQHRAKIEELRIHLLRWGFTTPDKKHQKEPPFLWMGYELHPDKWTIQPIQLPEKDSWTVNDIQRLVGKLNWASQIYSGIKVRQLCKLLRGAKALTDIVPLTEEAELELAENREILKEPVHGVYYDPSKDLIAEIQKQGYDQRTYQIYQEPFKNLKTGKYAKMRTAHTNDVKQLAEAVQKIAQESIVIWGKTPKFRLPIQKETWETWWTDYWQATWIPEWEFVNTPPLVKLWYQLEKEPIAGAETLYVDGAANRETKLGKAGYVTDKGRQKVVSLTETTNQKTELHAIQLALQDSGSEVNIVTDSQYALGIIQAQPDKSESELVNQIIEQLIKKERVYLSWVPAHKGIGGNEQVDKLVSSGIRKVLFLDGIDKAQDEHEKYHSNWRAMASEFNLPPIVAKEIVASCDKCQLKGEAIHGQVDCSPGIWQLDCTHLEGKIILVAVHVASGYMEAEVITAETGQETAYFILKLAGRWPVKVIHTDNGSNFTSGAVKAACWWAGIQQEFGIPYNPQSQGVVESMNKELKKIIGQIRDQAEHLKTAVQMAVFIHNFKRKGGIGGYSAGERIIDIIATDIQTKELQKQITKIQNFRVYYRDSRDPVWKGPAKLLWKGDGAVVIQDNSDIKVVPRRKAKIIRDYGKQMAGADCVAGRQDED

SEQ ID NO: 843 - protein, 998 aa, Artificial
  HIV Pol
FFRENLAFPQGEAREFPSEQTRANSPTSRKPRGDNPCSEAGAERQGTLNLPQITLWQRPLVSIKVGGQVKEALLDTGADDTVLEDIELPGKWRPKMIGGIGGFIKVRQYDRIPIEICGKRAIGTVLVGPTPVNIIGRNMLTQLGCTLNFPISPIETVPVKLKPGMDGPKVKQWPLTEEKIKALTAICEEMEKEGKITKIGPENPYNTPVFAIKKKDSTKWRKLVDFRELNKRTQDFWEVQLGIPHPAGLKKKKSVTVLDVGDAYFSVPLDEGFRKYTAFTIPSVNNETPGIRYQYNVLPQGWKGSPAIFQCSMTKILEPFRAQNPEIVIYQYMDDLYVGSDLEIGKHRAKIEELRRHLLRWGFTTPDKKHQKEPPFLWMGYELHPDKWTVQPIQLPEKESWTVNDIQKLVGKLNWASQIYPGIKVKQLCKLLRGAKALTDIVPLTEEAELELAENREILKEPVHGVYYDPSKDLVAEIQKQGLDQWTYQIYQEPFKNLKTGKYAKRKTAHTNDVKQLTEAVQKIALESIVIWGKIPKFRLPIQKETWETWWTDYWQATWIPEWEFVNTPPLVKLWYQLEKEPILGVETFYVDGAANRETKLGKAGYITDRGRQKVVSLTETTNQKTELQAIQLALQDSGPEVNIVTDSQYALGIIQAQPDKSESELVNQIIEQLIKKERVYLSWVPAHKGIGGNEQVDKLVSSGIRKVLFLDGIDKAQDDHERYHSNWRAMANEFNLPPIVAKEIVASCDKCQLKGEAIHGQVDCSPGIWQLDCTHLEGKIILVAVHVASGYIEAEVIPAETGQETAYYILKLAGRWPVKIIHTDNGSNFTSAAVKAACWWAGIQQEFGIPYNPQSQGVVESMNKELKKIIGQVRDQAEHLKTAVQMAVFIHNFKRKGGIGGYSAGERIIDIIATDIQTRELQKQIIKIQNFRVYYRDNRDPIWKGPAKLLWKGEGAVVIQDNSEIKVVPRRKVKIIRDYGKQMAGADCVAGRQDEDQ

SEQ ID NO: 844 - protein, 999 aa, Artificial
  HIV Pol
FFRENLAFPQGEARELPSEQTRTISPTSRELQVRGDNPRSEAGAEGQGTLNFPQITLWQRPLVSIKVGGQTKEALLDTGADDTVLEEINLPGKWKPKMIGGIGGFIKVRQYDQIPIEICGKKAIGTVLVGPTPVNIIGRNMLTQLGCTLNFPISPIETIPVKLKPGMDGPKVKQWPLTEEKIRALTAICDEMEKEGKITKIGPENPYNTPVFAIKKKDSTKWRKLVDFRELNKRTQDFWEVQLGIPHPAGLKKKKSVTVLDVGDAYFSVPLDEDFRKYTAFTIPSVNNETPGIRYQYNVLPQGWKGSPAIFQSSMTKILEPFRARNPDIVIYQYMDDLYVGSDLEIGQHRAKIEELRDHLLKWGFTTPDKKHQKEPPFLWMGYELHPDKWTVQPIQLPTKDSWTVNDIQKLVGKLNWASQNYPGIKVRQLCKLLRGTKALTDIVPLTEEAELELAENREILKEPVHGVYYDPSKDLIAEIQKQGNDQWTYQIYQEPFKNLKTGKYAKMRTAHTNDVKQLTEAVQKIAMESIVIWGKTPKFRLPIQKETWETWWTEYWQATWIPEWEFVNTPPLVKLWYQLEKEPIIGVETFYVDGAANRETKAGKAGYVTDRGRQKVISLTETANQKTELQAIQLALQDSGSEVNIVTDSQYALGIIQAQPDKSESELVNQIIEQLIQKERVYLSWVPAHKGIGGNEQVDKLVSSGIRKVLFLDGIDKAQEEHEKYHSNWRAMASEFNLPPIVAKEIVASCDKCQLKGEAIHGQVDCSPGIWQLDCTHLEGKVILVAVHVASGYIEAEVISAETGQETAYYILKLAARWPVKVIHTDNGSNFTSAAVKAACWWAGIQQEFGIPYNPQSQGAVESMNKELKKIIGQVRDQAEHLKTAVQMAVFIHNFKRKGGIGGYSAGERIIDIIATDIQTQELQKQIIKIQNFRVYYRDSRDPIWKGPAKLLWRGEGAVVIQDSSDIKVVPRRKAKIIKDYGKQMAGADCVAGRQDED

SEQ ID NO: 845 - protein, 1007 aa, Artificial
  HIV Pol
FFRENLAFPQRGEAGEFPSEKTRANSPTSRELQVREQTRANSSTSRELQAGAKRQGALNCPQITLWQRPLVSIKIGGQIKEALLDTGADDTVLEEMSLPGRWKPKMIGGIGGFIKVGQYDQIPIEICGKKAIGTVLIGPTPVNIIGRNMLTQLGCTLNFPISPIETVPVKLKPGMDGPKVKQWPLTEEKIKALTEICEEMEKEGKITKIGPENPYNTPVFAIKKKDSTKWRKLVDFRELNKRTQDFWEVQLGIPHPAGLKKKKSVTVLDVGDAYFSVPLDESFRKYTAFTIPSTNNETPGIRYQYNVLPQGWKGSPAIFQCSMTKILEPFRAKNPEIVIYQYMDDLYVGSDLEIGQHRAKIEELRGHLLQWGFTTPDKKHQKEPPFLWMGYELHPDKWTVQPIQLPEKDSWTVNDIQKLVGKLNWASQIYPGIKVKQLCKLLRGAKALTDIVPLTEEAELELAENREILKEPVHGVYYDPSKDLIAEIQKQGHDQWTYQIYQEPFKNLKTGKYAKMRTAHTNDVKQLTEAVQKIAIESIVIWGKTPKFRLPIQKETWETWWTDYWQATWIPEWEFVNTPPLVKLWYQLEKEPIPGAETFYVDGAANRETKTGKAGYVTDKGRQKIVSLNETTNQKAELQAIQLALQDSGLEVNIVTDSQYALGIIQAQPDKSESELVNQIIEQLINKEKIYLSWVPAHKGIGGNEQVDKLVSSGIRKVLFLDGIDKAQEEHEKYHSNWRARASEFNLPPIVAKEIVASCDKCQLKGEAMHGQVDCSPGIWQLDCTHLEGKIILVAVHVASGYIEAEVIPAETGQETAYFILKLAGRWPVKVIHTDNGSNFTSAAVKAACWWAGIQQEFGIPYNPQSQGVVESMNKELKKIIGQVRDQAEHLKTAVQMAVFIHNFKRKGGIGGYSAGERIIDIIATDIQTKELQKQILNIQKFRVYYRDSRDPIWKGPAKLLWKGEGAVVIQDNSDIKVVPRRKAKIIKDYGKQMAGADCVAGRQDED

SEQ ID NO: 846 - protein, 1008 aa, Artificial
  HIV Pol
FFRENLAFPQGEAGKFHSEQTSANSPTSRANSPTSRELQVRGDNPCSEAGAERQGSTLNFPQITLWQRPLVSIKVGGQIKEALLDTGADDTVLEDINLPGKWKPKMIGGIGGFIKVKQYEQILIEICGKKAIGTVLVGPTPVNIIGRNMLAQLGCTLNFPISPIETVPVKLKPGMDGPKVKQWPLTEEKIKALTAICEEMEKEGKITKIGPENPYNTPVFAIKKKDSTKWRKLVDFRELNKRTQDFWEVQLGIPHPAGLKKKKSVTVLDVGDAYFSVPLDENFRKYTAFTIPSINNATPGIRHQYNVLPQGWKGSPAIFQSSMTKILEPFRTQNPDIVIYQYMDDLYVGSDLEIGQHRAKIEELREHLLKWGLTTPDKKHQKEPPFLWMGYELHPDKWTVQPIVLPEKDSWTVNDIQKLVGKLNWASQIYPGIKVRQLCKLIRGTKKLTDIVPLTEEAELELAENREILKEPVHGVYYDPSKDLIAEIQKQGDDQWTYQIYQEPFKNLKTGKYAKMRTTHTNDVRQLTEAVQKITMESIVIWGKTPKFRLPIQKDTWETWWTDYWQATWIPEWEFVNTPPLVKLWYQLEKEPIGGAETFYVDGAANRETKMGKAGYVTDKGRQKIVALTETTNQKAELQAIQLALQDSGSEVNIVTDSQYALGIIQAQPDKSESEIVNQIIEQLINKERVYLSWVPAHKGIGGNEQVDKLVSRGIRKVLFLDGIDKAQEEHEKYHSNWRAMASEFNLPPIVAKEIVASCDKCQLKGEAMHGQVDCSPGIWQLDCTHLEGKVILVAVHVASGYIEAEVIPAETGQETAYYILKLAGRWSVKTIHTDNGSNFTSAAVKAACWWAGIQQEFGIPYNPQSQGVVESMNKELKKIIGQVRDQAEHHKTAVQMAVFIHNFKRKGGIGGYSAGERIIDIIATDIQTRELQRQIIKIQIFRVYYRDSRDPIWKGPAKLLWKGEGAVVIQDNSDIKVVPRRKVKIIKDYGKQMAGADCVAGRQDEDQ

SEQ ID NO: 847 - protein, 1006 aa, Artificial
  HIV Pol
FFRENLAFPQGEAREFPPEQTRANSPTSRANSPTGRELQVRGDKPRSEAGAEGQGTLNFPQITLWQRPLVSIKVGGQTKEALLDTGADDTVLEEINLPGKWKPKMIGGIGGFIKVRQYDQILIEICGKKAIGTVLVGPTPINIIGRNMLTQLGCTLNFPISPIETVPVKLKPGMDGPKVKQWPLTEEKIKALTAICEEMEKEGKITKIGPENPHNTPVFAIKKKDSTKWRKLVDFRELNKRTQDFWEVQLGIPHPAGLKKKKSVTVLDVGDAYFSVPLDEDFRKYTAFTIPSVNNETPGIRYQYNVLPQGWKGSPAIFQGSMTKILEPFRAQNPEIVIYQYMDDLYVGSDLEIGQHRAKIEELREHLLKWGFTTPDKKHQKEPPFLWMGYELHPDKWTVQPIQLPEKDSWTVNDIQKLVGKLNWASQIYPGIKVKNLCKLLRGAKALTDIVPLTEEAELELAENREILKEPVHGVYYDPSKDLIAEIQKQGHDQWTYQIYQEPFKNLKTGKYAKRRTAHTNDVKQLTEVVQKITMESIVIWGKTPKFRLPIQKDTWETWWTDYWQATWIPEWEFVNTPPLVKLWYQLEKEPIAGAETFYVDGAASRETKKGKAGYVTDRGRQKCVTLTETTNQKTELQAIQLALQDSGPEVNIVTDSQYALGIIQAQPDKSESELVNQIIEQLINKEKIYLSWVPAHKGIGGNEQVDKLVSSGIRKVLFLDGIDKAQEEHEKYHNNWRAMASEFNLPPIVAKEIVASCDKCQLKGEAMHGQVDCSPGIWQLDCTHLEGKIILVAVHVASGYIEAEVIPAETGQETAYYILKLAGRWPVKVIHTDNGSNFTSAAVKAACWWAGIQQEFGIPYNPQSQGVVESMNKELKKIIGQVRDQAEHPKTAVQMAVFIHNFKRKGGIGGYSAGERIIDIIATDIQTKELQRQILKIQNFRVYYRDSRDPIWKGPAKLLWKGEGAVVIQDNSDIKVVPRRKAKIIKDYGKQMAGADCVAGGQDED

SEQ ID NO: 848 - protein, 1000 aa, Artificial
  HIV Pol
FFRENLAFPQGEAREFPSEKTRANSPTGRELQVRGDNPRSEAGGERQGTLKFPQITLWQRPLVSIKVGGQIREALLDTGADDTVLEDINLPGKWKPKMIGGIGGFIKVRQYDQILIEICGKKAIGTVLVGPTPVNIIGRNMLTQLGCTLNFPISPIETVPVKLKPGMDGPKVKQWPLTEEKIKALTAICEEMEKEGKITKIGPENPYNTPVFAIKKKDSTKWRKLVDFRELNKRTQDFWEVQLGIPHPAGLKKKKSVTVLDVGDAYFSVPLDENFRKYTAFTIPSINNETPGIRYQYNVLPQGWKGSPAIFQCSMTRILEPFRAQNPEIVIYQYMDDLYVGSDLEIGQHRAKIEELRQHLLKWGFTTPDKKHQKEPPFLWMGYELHPDKWTVQPIQLPEKDSWTVNDIQELVGKLNWASQIYSGIKVKQLCKLLRGTKALTDIVPLTEEAELELAENREILKEPVHGVYYDPSKDLIAEIQKQGQDQWTYQIYQEPFKNLKTGKYAKRRTAHTNDVRQLTEAVQKITMESIVIWGKTPKFRIPIQKETWETWWTDYWQATWIPEWEFVNTPPLVKLWYQLEKEPIAGVETFYVDGAASRDTKIGKAGYVTDRGKQKIITLTETTNQKTELQAIQLALQDSGPEVNIVTDSQYALGIIQAQPDNSESELVNQIIEQLIQKERVYLSWVPAHKGIGGNEQVDKLVSKGIRKVLFLDGIDKAQEDHEKYHSNWRAMANEFNLPPIVAKEIVASCDKCQLKGEAIHGQVDCSPGIWQLDCTHLEGKIIIVAVHVASGYVEAEVIPAETGQETAYYILKLAGRWPVKVIHTDNGSNFTSTAVKAACWWAGIQQEFGIPYNPQSQGVVESMNKELKKIIGQVRDRAEHLKTAVQMAVFIHNFKRKGGIGGYSAGERIIDIIATDIQTKELQKQITKIQNFRVYYRDSGDPIWKGPAKLLWKGEGAVVIQDNSDIKVVPRRKAKIIRDYGKQMAGADCVAGRQDEDQ

SEQ ID NO: 849 - protein, 1011 aa, Artificial
  HIV Pol
  misc_feature (263)..(263): Xaa can be any naturally occurring amino acid
FFRENLAFQQGEAREFPPEQDSANSPTSRELQDRANSPTSREFQVRGDNPCSEAGAERQGSLNFPQITLWQRPLVPIKVGGQIKEALLDTGADDTVLEEINLPGKWKPKMIGGIGGLIKVRQYDQVVIEICEKKTIGTVLVGPTPVNIIGRNLLTQLGCTLNFPISPIETVPVKLKPGMDGPKVKQWPLTEEKIKALTEICKEMEKEGKIEKIGPENPYNTPVFAIKKKDSTKWRKLVDFRELNKRTQDFWEVQLGIPHPAGXKKKKSVTVLDVGDAYFSVPLDEDFRKYTAFTIPSINNATPGIRYQYNVLPQGWKGSPAIFQSSMTKILKPFREQNPEMVIYQYMDDLYVGSDLEIGQHTAKIEELRDHLLGWGFTTPDKKHQKEPPFLWMGYELHPDKWTVQPIQLPEKESWTVNDIQKLVGKLNWASQIYPGIKVRQLCKLLRGAKALTDIVPLTEEAELELAENRELLKEPVHGVYYDPSKDLITEIQKQGHDQWTYQIYQEPFKNLKTGKYAKMRSAHPNDVKQLTEAVHKIAMESIVIWGKTPKFRLPIQKETWETWWTDYWQATWIPEWEFVNTPPLVKLWYQLEKEPIGGVETFYVDGAANRETKVGKAGYVTDKGRQKVITINETTNQKTELQAIYLALQDSGSEVNIVTDSQYALGIIQAQPDKSESELVNQIIEQLIKKERVYLSWVPAHKGIGGNEQVDKLVSSGIRKVLFLDGIDKAREEHEKYHSNWRAMASEFNLPPIVAKEIVASCDKCQLKGEATHGQVDCSPGIWQLDCTHLEGKVILVAVHVASGYIEAEVIPAETGQETAYFILKLAGRWPVKVIHTDNGSNFTSAAVKAACWWAGIQQEFGIPYNPQSQGVVESMNKELKKIIGQVRDQAEHLKTAVQMAVFIHNFKRKGGIGGYSAGERIIDIIATDIQTRELQKQIIQIQNFRVYYRDSRDPIWKGPAKLLWKGEGAVVIQDNSDIKVVPRRKAKIIKDYGKQMAGADCVASRQDED

SEQ ID NO: 850 - protein, 999 aa, Artificial
  HIV Pol
FFRENLAFPQGEAREFLPEQDRANSPTSRELQIRGDDPRSEAGAERQRTLNFPQITLWQRPLVSIKVGGQIKEALLDTGADDTVLEDISLPGKWKPKMIGGIGGFIKVRQYDQIPIEICGKKAIGTVLVGPTPVNIIGRNMLTQLGCTLNFPISPIETVPVKLKPGMDGPKVKQWPLTEEKIKALTAICEEMEKEGKITKIGPENPYNTPVFAIKKKDSTKWRKLVDFRELNKRTQDFWEVQLGIPHPAGLKKKKSVTVLDVGDAYFSVPLDEGFRKYTAFTIPSINNETPGIRYQYNVLPQGWKGSPAIFQSSMTRILEPFRIQNPEIVIYQYMDDLYVGSDLEIGQHRAKIEELRGHLLKWGFTTPDKKHQKEPPFLWMGYELHPDKWTVQPIQLPEKDSWTVNDIQKLVGKLNWASQIYPGIKVRQLCKLLRGAKALTDIVPLTEEAELELAENREILKEPVHGVYYDPSKDLIAEVQKQGCEQWTYQIYQEPFKNLKTGKYAKMRTAHTNDVKQLAEAVQKIAVESIVIWGKTPKFRLPIQKETWETWWTDYWQATWIPEWEFVNTPPLVKLWYQLEKEPIVGAETFYVDGAANRETKKGKAGYVTDRGRQRIVNLTETTNQKTELQAIHLALQDSGLEVNIVTDSQYALGIIQAQPDKSESELVNQIIEQLIKKERVYLSWVPAHKGIGGNEQVDKLVSNGIRKVLFLDGIDKAQDEHEKYHSNWRAMASEFNLPPIVAKEIVASCDKCQLKGEAIHGQVDCSPGIWQLDCTHLEGKIILVAVHVASGYIEAEVIPAETGQETAYYILKLAGRWPVKVIHTDNGSNFTSAAVKAACWWAGIQQEFGIPYNPQSQGVVESMNKELKKIIGQVRDQAEHLKTAVQMAVFIHNFKRKGGIGGYSAGERIIDIIATDIQTRELQKQIIKIQNFRVYYRDSRDPIWKGPAKLLWKGEGAVVIQDNSDIKVVPRRKAKIIKDYGKQMAGADCVADRQDED

SEQ ID NO: 851 - protein, 1005 aa, Artificial
  HIV Pol
FFRENLAFQQGEAREFPSEQTRANSPTRANSPTSRELQVRGGNPHSEAGAERQGTLNFPQITLWQRPLVSIKVGGQIKEALLDTGADDTVLEEINLPGKWKPKMIGGIGGFIKVRQYDQILIEICGKKAIGTVLVGPTPVNIIGRNMLTQLGCTLNFPISPIETVPVKLKPGMDGPKVKQWPLTEEKIKALTEICEEMEKEGKITKIGPENPYNTPVFAIKKKDSTKWRKLVDFRELNKRTQDFWEVQLGIPHPAGLKKKKSVTVLDVGDAYFSVPLDEDFRKYTAFTIPSINNETPGIRYQYNVLPQGWKGSPAIFQSSMTKILEPFRAKNPEIVIYQYMDDLYVGSDLEIGQHRAKIEELREHLLKWGFTTPDKKHQKEPPFLWMGYELHPDKWTVQPIQLPEKDSWTVNDIQKLVGKLNWASQIYPGIKVRQLCKLLRGTKALTDIVPLTEEAELELAENREILKEPVHGVYYDPSKDLIAEVQKQGNDQWTYQIYQEPFKNLKTGKYAKMRTAHTNDVKQLTEAVQKIAMESIVIWGKTPKFRLPIQKETWETWWTDYWQATWIPEWEFVNTPPLVKLWYQLEKEPIAGVETFYVDGATNRETKRGNAGYVTDRGRQKIVSLTETTNQKAELQAIQLALQDSGSEVNIVTDSQYALGIIQAQPDKSEAELVNQIIEQLIQKERVYLSWVPAHKGIGGNEQVDKLVSKGIRKVLFLDGIDKAQEEHEKYHSNWRAMASEFNLPPVVAKEIVASCDKCQLKGEAIHGQVDCSPGIWQLDCTHLEGKVILVAVHVASGYIEAEVIPAETGQETAYYILKLAGRWPVKVIHTDNGSNFTSTAVKAACWWAGIQQEFGIPYNPQSQGVVEPMNKELKKIIGQVRDQAEHLKTAVQMAVFIHNFKRKGGIGGYSAGERIIDIIATDIQTKELQKQIIKIQNFRVYYRDSRDPIWKGPAKLLWKGEGAVVIQDNSDIKVVPRRKVKIIKDYGKQMAGADCVAGRQDED

SEQ ID NO: 852 - protein, 999 aa, Artificial
  HIV Pol
  misc_feature (161)..(161): Xaa can be any naturally occurring amino acid
FFRKNLAFQQGEAREFPSEQTRANSPTSRELQVRGDNPHSEARVKGQGTPNFPQITLWQRPLVSIKVGGQIKEALLDTGADDTVLEDINLPGKWKPKMIGGIGGFIKVRQYDQIHIEICGKRAIGTVLVGPTPVNIIGRNMLTQLGCTLNFPISPIETVPXKLKPGMDGPKVKQWPLTEEKIKALTAICEEMEKEGKISKIGPENPYNTPVFAIKKKDSTKWRKLVDFRELNKRTQDFWEVQLGIPHPAGLKKKKSVTVLDVGDAYFSIPLDENFRKYTAFTIPSTNNATPGVRYQYNVLPQGWKGSPAIFQSSMTKILEPFRAQNPDIVIYQYMDDLYVGSDLEIGQHRAKIEKLREHLLRWGLTTPDKKHQKEPPFLWMGYEPHPDKWTVQPILLPEKESWTVNDIQKLVGKLNWASQIYPGIQVKQLCKLLRGAKALTDIVPLTEEAELELAENREILKEPVHGVYYDPSKDLIAEIQKQGNGQWTYQIYQEPFKNLKTGKYAKMRTAHTNDVKQLAEAVQKVAIESIVIWGKIPKFRLPIQKETWETWWTDYWQATWIPEWEFVNTPPLVKLWYQLEKEPIVGVETFYVDGAANRDTKLGKAGYVTDRGRQKVVSLTETTNQKTELQAIHLALQDSGPEVNIVTDSQYALGIIQAQPDKSESELVNQIIEQLIKKKKVYLSWVPAHKGIGGNEQVDKLVSSGIRKILFLDEIDKAQDEHEKYHSNWRAMASEFNLPPVVAKEIVACCDKCQQKGEAIHGQVDCSPGIWQLDCTHLEGKIILVAVHVASGYIEAEVIPAETGQETAYYILKLAGRWPVKTIHTDNGSNFTSTAVKAACWWAGIQQEFGIPYNPQSQGVVESMNKELKKIIGQVRDQAEHLKTAVQMAVFIHNFKRKGGIGGYSAGERIIDIIASDIQTRELQKQIIKIQNFRVYYRDSRDPIWKGPAKLLWKGEGAVVIQDKSDIKVVPRRKAKIIKDYGKQMAGDDCVAGRQDED

SEQ ID NO: 853 - protein, 1005 aa, Artificial
  HIV Pol
FFREDLAFQQREAREFPSEQTRANSPTRANSPTSRELQVRGDKSRSEAGVEKQGNLNFPQITLWRRPLVTIKVGGQIKEALLHPGADDTVLEEINLPRKWKPKMIGGIGGFIKVRQYDQILIEICGKKAIGTVLVGPTPVNIIGRNMLTPLGCTLNFPISPIETVPVKLKPGMDGPKVKQWPLTEEKIKALTAICEEMEEEGKIEKIGPENPYNTPVFAIKKKDSTKWRKLVDFRELNKRTQDFWEVQLGIPHPAGLKKKKSVTVLDVGDAYFSVPLDKDFRKYTAFTIPSINNETPGIRYQYNVLPQGWKGSPAIFQSSMTKILEPFRTKNPDIVIYQYMDDLYVGSDLEIGQHRAKIEELREHLLKWGFTTPDKKHQKEPPFLWMGYELHPDKWTVQPIMLPTKDSWTVNDIQKLVGKLNWASQIYPGIKVRQLCKLLRGAKALTDIVPLTEEAELELAENREILKEPVHGVYYDPSKELIAEIQKQGNDQWTYQIYQEPFKNLKTGKYAKIRTAHTNDVRQLTEAVQKITMECIVIWGKTPKFRLSIQKDTWETWWTDYWQATWIPEWEFVNTPPLVKLWYQLEKEPIVGAETFYVDGAANRETKKGKAGYVTDRGRQKVVTLTETTNQKTELQAIQLALQDSESEVNIVTDSQYALGIIQAQPDKSESELVNQIIGELIKKERVYLSWVPAHKGIGGNEQVDKLVSNGIRKVLFLDGIDKAQEEHEKYHSNWRAMASEFNLPPIVAKEIVASCDKCQLKGEAIHGQVDCSPGVWQLDCTHLEGKVILVAVHVASGYIEAEVIPAETGQDTAYYMLKLAGRWPVKVIHTDNGSNFTSAAVKAACWWAGVQQEFGIPYNPQSQGVVESTNKELKKIIGQVREQAEHLKTAVQMAVFIHNFKRRGGIGGYSAGERIIDIIATDIQTKELQKQITKIQNFRVYYRDSRDPIWKGPAKLLWKGEGAVVIQDNSDIKVVPRRKAKIIKDYGKQMAGADCVAGRQDED

SEQ ID NO: 854 - protein, 996 aa, Artificial
  HIV Pol
FFRENLAFQQREAREFSSEQDRANSPTNGGRDNLLAEAGEQGAVHPCNFPQITLWQRPLVTVKIEGQLREALLDTGADDTVLEDINLPWKWKPKMIGGIGGFIKVRQYDQIVIEICGKRAIGTVLVGPTPVNIIGRNMLVQLGCTLNFPISPIETVPVKLKPGMDGPKVKQWPLTEEKIKALTEICKEMEKEGKISKIGPENPYNTPVFAIKKKDSDKWRKLVDFRELNKRTQDFWEVQLGIPHPAGLKKKKSVTVLDVGDAYFSVPLHEDFRKYTAFTIPSINNETPGIRYQYNVLPQGWKGSPAIFQSSMTKILDPFRARNPEMVIYQYMDDLYVGSDLEIDQHRAKIEELRAHLLRWGFTTPDKKHQKEPPFLWMGYELHPDKWTVQPIKLPEKDSWTVNDIQKLVGKLNWASQIYAGIKVRQLCKLLRGTKALTDIVPLTREAELELEENREILKDPVHGVYYDPSKDLIAEIQKQGQGQWSYQIYQEPFKNLKTGKYAKRKSTHTNDVKQLTEAVQKIATESIVIWGKIPKFRLPIQKETWETWWTEWWQATWIPEWEFVNTPPLVKLWYQLETEPIAGAETFYVDGAANRETKLGKAGYVTDRGRQKIVPLTETTNQKTELHAIYLALQDSGSEVNIVTDSQYALGIIQAQPDSSESELVNQIIEKLIEKERVYLSWVPAHKGIGGNEQVDKLVSCGIRKVLFLDGIDKAQEEHEKYHSNWRAMAHDFNLPPIVAKEIVASCDKGQLKGEAMHGQVDCSPGIWQLDCTHLEGKIIVVAVHVASGYIEAEVIPAETGQETAYFLLKLAGRWPVKVIHTDNGPNFTSAAVKAACWWADVKQEFGIPYNPQSQGVVESMNKELKKIIGQVRDQAEHLKTAVQMAVFIHNFKRKGGIGGYSAGERIIDIIATDIQTKELQKQIIKIQNFRVYYRDSRDPIWKGPAKLLWKGEGAVVIQDNGDIKVVPRRKAKIIRDYGKQMAGDDCVAGRQDED

SEQ ID NO: 855 - protein, 1003 aa, Artificial
  HIV Pol
FFRENLAFQQREARKFSSEQNRANSPTSRELENGGRDNLLPEAGTGDQGTIQSCNFPQITLWQRPLVTVKIEGQLKEALLDTGADDTVLEEINLPGKWKPKMIGGIGGFIKVRQYDQIAIEICGKRAIGTVLVGPTPVNIIGRNMLVQLGCTLNFPISPIETVPVKLKPGMDGPKVKQWPLTEEKIKALTEICKEMEKEGKISKIGPENPYNTPVFAIKKKDSTKWRKLVDFRELNKRTQDFWEVQLGIPHPAGLKKKKAVTVLDVGDAYFSVPLHEDFRKYTAFTIPSTNNETPGVRYQYNVLPQGWKGSPAIFQSSMTKILEPFRSKNTELIIYQYMDDLYVGSDLEISQHRVKIEELRAHLLKWGFYTPDKKHQKEPPFLWMGYELHPDKWTVQPIKLPEKDSWTVNDIQKLVGKLNWASQIYAGIKVKQLCKLLRGAKALTDIVTLTKEAELELEENREILKTPVHGVYYDPSKDLIAEIQKQGQDQWTYQIYQEPFKNLKTGKYAKRRSTHTNDIKQLTEAVQKITMESIVIWGKTPKFKLPIQKETWETWWAEYWQATWIPEWEFVNTPPLVKLWYQLEKEPIAGAETFYVDGAANRETKLGKAGYVTDRGRQKIVSLTETTNQKTELHAIYLALQDSGLEVNIVTDSQYALGIIQAQPERSESEIVNQIIEKLIEKERVYLSWVPAHKGIGGNEQVDKLVSSGIRKVLFLDGIDKAQEEHERYHSNWRAMAHDFNLPPVVAKEIVASCDKCQLKGEAMHGQVDCSPGIWQLDCTHLEGKVILVAVHVASGYIEAEVIPTETGQDTAYFILKLAGRWPVKVIHTDNGPNFISATVKAACWWAGIQQEFGIPYNPQSQGVVESMNKELKKIIGQVRDQAEHLKTAVQMAVFIHNFKRKGGIGGYSAGERIIDIIATDIQTKELQRQITKIQNFRVYYRDSRDPIWKGPAKLLWKGEGAVVIQDNSDIKVVPRRKAKIIRDYGKQMAGDDCVAGRQDED

SEQ ID NO: 856 - protein, 1003 aa, Artificial
  HIV Pol
FFRENLAFPQREAREFSSEQNRTNSPTSRGLWNGGGDNPLAEAGAEKQGTTHSCNFPQITLWQRPLVTVKIEGQLREALLDTGADDTVLEDINLPGKWKPKMIGGIGGFIKVRQYDQITIEICEKRAIGTVLVGPTPVNIIGRNMLVQLGCTLNFPISPIETVPVKLKPGMDGPKVKQWPLTEEKIKALTEICKEMEKEGKISKIGPENPYNTPVFAIKKKDSTKWRKLVDFRELNKRTQDFWEVQLGIPHPAGLKMKKSVTVLDVRDAYFSVPLHEDFRKYTAFTIPSTNNETPGVRYQYNVLPQGWKGSPAIFQSSMTKILEPFRKQNPEIVIYRYMDDLYVGSDLEIGQHRTKIEELRNHLLKWGFYTPDKKHQKEPPFLWMEYELHPDKWTVQPIKLPEKDSWTVNDIQKLVGKLNWASQIYAEIKVKQLCKLLRGAKALTDIVPLTKEAELELEENREILKDPVHGVYYDPSKDLIAEVQKQGPDQWTYQIYQEPFKNLKTGKYAKRRSTHTNDVKQLTEAVQKIVMESIVIWGKIPKFRLPIQKETWETWWTEYWQATWIPEWEFVNTPPLVKLWYQLETEPITGAETFYVDGAANRETKLGKAGYVTDKGRQKIVSLTDTTNQKTELHAIYLALQDSGLEVNIVTDSQYALGIIQAQPDRSESEIVNLIIEKLIEKERVYLSWVPAHKGIGENEQVDKLVSSGIRKVLFLDGIDKAQDEHEKYRSNWRAMAHDFNLPPVVAKEIVACCDKCQVKGEAMHGQVDCSPGIWQLDCTHLEGKIILVAVHVASGYIEAEVIPAETGQETAYFILKLAGRWPVKVIHTDNGPNFISAPVKAACWWAGVQQEFGIPYNPQSQGVVESMNKELKKIIGQIRDQAEHLKTAVQMAVFIHNSKRKGGIGGYSAGERIIDIIATDIQTKELQRQITKIQNFRVYYRDSRDPIWKGPAKLLWKGEGAVVIQDNSDIKVVPRRRAKIIRDYGKQMAGDDCVAGRQDED

SEQ ID NO: 857 - protein, 1003 aa, Artificial
  HIV Pol
FFRENLAFQQREAREFSSEQDRANSPTRREPRVRRGDSLLPEAGDEGKGAVYPCNFPQITLWQRPLVTVKIGGQLIEALLDTGADDTVLEDINLPGRWKPKMIGGIGGFIKVRQYDQILIEISGKKAIGTVLVGPTPINIIGRNMLIQIGCTLNFPISPIETVPVKLKPGMDGPKVKQWPLTEEKIKALTEICKEMEKEGKISKIGPENPYNTPIFAIKKKDSTKWRKLVDFRELNKRTQDFWEVQLGIPHPAGLKKKKSVTVLDVGDAYFSVPLDEGFRKYTAFTIPSINNETPGVRYQYNVLPQGWKGSPAIFQSSMTKILEPFRADNPEIVIYQYMDDLYVGSDLEIGQHRAKIEELREHLLRWGFTTPDKKHQKEPPFLWMGYELHPDKWTVQPIQLPDKESWTVNDIQKLVGKLNWASQIYPGIKVKQLCKLLRGTKALTEIVSLTAEAELELAENREILKEPVHGAYYEPSKELIAEVQKQGLDQWTYQIYQEPYKNLKTGKYAKRGSAHTNDVKQLTEVVQKIATESIVIWGKTPKFKLPIRKETWEVWWTEYWQATWIPDWEFVNTPPLVKLWYRLETEPIPGAETYYVEGAANRETKLGKAGYVTDKGKQKIINLTETTNQKTELHAIQLALQDSGSEVNIVTDSQYALGIIQAQPDSSEAEIVNQIIEQLIRKEKVYLSWVPAHKGIGGNEQVDKLVSSGIRKVLFLDGIDKAQEEHERYHSNWRAMASDFNLPPIVAKEIVASCDKGQLKGEAMHGQVDCSPGVWQLDCTHLEGKIILVAVHVASGYIEAEVIPAETGQETAYFILKLAGGWPVKVIHTDNGSNFTSAAVKAACWWANVTQEFGIPYNPQSQGVVESMNKELKKIIGQVRDQAEHLKTAVQMAVFIHNFKRKGGIGRYSAGERIIDIIASDIQTKELQKQITKIQNFRVYYRDSRDPIWKGPAKLLWKGEGAVVIQDNNEIKVVPRRKTKILRDYGKQMAGDDCVAGRQDED

SEQ ID NO: 858 - protein, 997 aa, Artificial
  HIV Pol
  misc_feature (85)..(85): Xaa can be any naturally occurring amino acid
  misc_feature (103)..(103): Xaa can be any naturally occurring amino acid
  misc_feature (106)..(106): Xaa can be any naturally occurring amino acid
  misc_feature (123)..(123): Xaa can be any naturally occurring amino acid
  misc_feature (128)..(128): Xaa can be any naturally occurring amino acid
  misc_feature (137)..(137): Xaa can be any naturally occurring amino acid
  misc_feature (141)..(141): Xaa can be any naturally occurring amino acid
  misc_feature (189)..(189): Xaa can be any naturally occurring amino acid
  misc_feature (195)..(195): Xaa can be any naturally occurring amino acid
  misc_feature (205)..(205): Xaa can be any naturally occurring amino acid
  misc_feature (230)..(230): Xaa can be any naturally occurring amino acid
  misc_feature (232)..(232): Xaa can be any naturally occurring amino acid
  misc_feature (242)..(242): Xaa can be any naturally occurring amino acid
  misc_feature (281)..(282): Xaa can be any naturally occurring amino acid
  misc_feature (295)..(295): Xaa can be any naturally occurring amino acid
  misc_feature (338)..(338): Xaa can be any naturally occurring amino acid
  misc_feature (384)..(385): Xaa can be any naturally occurring amino acid
  misc_feature (388)..(388): Xaa can be any naturally occurring amino acid
  misc_feature (415)..(415): Xaa can be any naturally occurring amino acid
  misc_feature (438)..(438): Xaa can be any naturally occurring amino acid
  misc_feature (466)..(466): Xaa can be any naturally occurring amino acid
  misc_feature (470)..(470): Xaa can be any naturally occurring amino acid
  misc_feature (511)..(512): Xaa can be any naturally occurring amino acid
  misc_feature (518)..(518): Xaa can be any naturally occurring amino acid
  misc_feature (534)..(534): Xaa can be any naturally occurring amino acid
  misc_feature (537)..(537): Xaa can be any naturally occurring amino acid
  misc_feature (549)..(549): Xaa can be any naturally occurring amino acid
  misc_feature (552)..(552): Xaa can be any naturally occurring amino acid
  misc_feature (554)..(554): Xaa can be any naturally occurring amino acid
  misc_feature (556)..(556): Xaa can be any naturally occurring amino acid
  misc_feature (558)..(559): Xaa can be any naturally occurring amino acid
  misc_feature (564)..(564): Xaa can be any naturally occurring amino acid
  misc_feature (682)..(682): Xaa can be any naturally occurring amino acid
  misc_feature (686)..(686): Xaa can be any naturally occurring amino acid
  misc_feature (694)..(695): Xaa can be any naturally occurring amino acid
  misc_feature (706)..(706): Xaa can be any naturally occurring amino acid
  misc_feature (709)..(709): Xaa can be any naturally occurring amino acid
  misc_feature (715)..(715): Xaa can be any naturally occurring amino acid
  misc_feature (722)..(722): Xaa can be any naturally occurring amino acid
  misc_feature (744)..(744): Xaa can be any naturally occurring amino acid
  misc_feature (750)..(750): Xaa can be any naturally occurring amino acid
  misc_feature (757)..(757): Xaa can be any naturally occurring amino acid
  misc_feature (759)..(759): Xaa can be any naturally occurring amino acid
  misc_feature (762)..(762): Xaa can be any naturally occurring amino acid
  misc_feature (769)..(769): Xaa can be any naturally occurring amino acid
  misc_feature (779)..(780): Xaa can be any naturally occurring amino acid
  misc_feature (785)..(785): Xaa can be any naturally occurring amino acid
  misc_feature (788)..(788): Xaa can be any naturally occurring amino acid
  misc_feature (849)..(849): Xaa can be any naturally occurring amino acid
  misc_feature (854)..(854): Xaa can be any naturally occurring amino acid
  misc_feature (865)..(865): Xaa can be any naturally occurring amino acid
  misc_feature (906)..(906): Xaa can be any naturally occurring amino acid
  misc_feature (925)..(925): Xaa can be any naturally occurring amino acid
  misc_feature (933)..(933): Xaa can be any naturally occurring amino acid
  misc_feature (952)..(952): Xaa can be any naturally occurring amino acid
  misc_feature (964)..(964): Xaa can be any naturally occurring amino acid
  misc_feature (978)..(978): Xaa can be any naturally occurring amino acid
  misc_feature (980)..(981): Xaa can be any naturally occurring amino acid
  misc_feature (987)..(987): Xaa can be any naturally occurring amino acid
FFRKNLAFQQREARKFSSEQTRAISPTSRKLDGGRDNPLPETGTERQGTVSSFNFPQITLWQRPLVTVRIGGQLKEALLDTGADXTVLEDINLPGKWKPKMIXGIXGFIKVRQYDQILVEICXKKAIXTVLVGPTPXNIIXRNMLTQLGCTLNFPISPIETVPVTLKPGMDGPKVKQWPLTEEKIKALXDICKEXEKEGKISKIXPENPYNTPVFAIKKKDSTKWRKLVXFXELNKRTQDFXEVQLGIPHPAGLKKKKSVTVLDVGDAYFSVPLDESFRKXXAFTIPSVNNETPXIRYQYNVLPQGWKGSPSIFQSSMTKILEPFRLKNPEIVIYQYXDDLYVGSDLETGQHRTKIEELRAHLLSWGFTTPDKKHQKEPPFLWXXYEXHPDKWTVQPIMLPDKDSWTVNDIQKLXGKLNWASQIYPEIKVRQLCKLLXGAKALTDIVTLTEEAELELAENREILKXPVHXVYYDPSKDLVAEIQKQGQDQWTYQIYQEPFKNLKTGKYAKXXSAHTNXVKQLTAVVQKVATESXILXGKTPKFRLPIQXETXEXWXMXXWQATXIPEEFVNTPPLVKLWYQLEKEPIVRAETFYVDRAANRETKIGKAGYVTDRRQKVVPLTETTNQKTELHAIHLVLQDSGSEVDIVTDSQYALGIISAQPDRSESEIVNKIIEKLIKKEXVYLXVPAHKRIXXNEQVDKLVSNXIRXVLFLEXIDKAQEXHEKYHSNKAMASDFNLPPIVAXEIVASXDKCQLKXEXMHXQVDCSPXIWQLDCTHLXXKVIIXAVXVASGYIEAEVIPAETGQETAYFLLKLAGRWPVKVVHTDNGPNFTSSAVKAACWANIQQEFXIPYNXQSQGVVESMNXELKKIIRQVREQAEYLKTAVQMAVFIHNFKRKGGIGGYSAXERIIDIIATDIQTKELQKXITKIQNFXVYYRDSRDPIWKGPAKLLXKGEGAVVIQDNXDIKVVPRRKAKIIXDXXKQMAGXDCVASRQDED

SEQ ID NO: 859 - protein, 1003 aa, Artificial
  HIV Pol
FFRENLAFQKGEAREFSSEQTGTNSSTSRDLWDGGRDSLPSEAGAERQGTGPTLSFPQITLWQRPLVTVRIGGQLKEALLDTGADDTVLEDINLPGKWKPKMIGGIGGFIKVKQYDQILIEICGKKAIGTVLVGPTPVNIIGRNMLTQIGCTLNFPISPIETVPVKLKPGMDGPKVKQWPLTEEKIKALTEICTEMEKEGKISKIGPENPYNTPIFAIKKKDSTKWRKLVDFRELNKRTQDFWEVQLGIPHPAGLKKKKSVTVLDVGDAYFSVPLHEEFRKYTAFTIPSTNNETPGVRYQYNVLPQGWKGSPAIFQSSMTKILEPFRSKNPEIVIYQYMDDLYVGSDLEIGQHRAKIEELRAHLLSWGLITPDKKHQKEPPFLWMGYELHPDKWTVQPIELPEKDSWTVNDIQKLVGKLNWASQIYAGIKVKQLCKLLRGAKALTDVVTLTEEAELELAENREILKEPVHGVYYDPSKDLIAEIQKQGQDQWTYQIFQEPFKNLKTGKYARKRSAHTNDVRQLAEVVQKVVMESIVIWGKTPKFRLPIQKETWDTWWMDYWQATWILEWEFVNTPPLVKLWYQLEKDPIAGAETFYVDGAANRETKLGKAGYVTDKGRQKVVSLTETTNQKTELHAIHLALQDSGSEVNIVTDSQYALGIIQAQPDKSESEIVNQIIEKLIEKDKVYLSWVPAHKGIGGNEQVDKLVSSGIRKVLFLDGIDKAQEEHERYHSNWRTMASDFNLPPIVAKEIVASCDKCQLKGEAMHGQVDCSPGIWQLDCTHLEGKVIVVAVHVASGYIEAEVIPAETGQETAYFLLKLAGRWPVKIVHTDNGSNFTSAAVKAACWWANIQQEFGIPYNPQSQGVVESMNKELKKIIGQVREQAEHLKTAVQMAVFIHNFKRKGGIGGYSAGERIIDIIATDIQTKELQKHITKIQNFRVYYRDSRDPLWKGPAKLFWKGEGAVVIQDNSDIKVVPRRKAKIIRDYGKQMAGDDCVAGRQDED

SEQ ID NO: 860 - protein, 998 aa, Artificial
  HIV Pol
  misc_feature (296)..(296): Xaa can be any naturally occurring amino acid
  misc_feature (602)..(602): Xaa can be any naturally occurring amino acid
FFRENLAFQQREARKFSSEQTRANSPTSRDPWDRRRDSLPSETGADPTFSFPQITLWQRPLVTVKVGGQLREALLDTGADDTVLEDINLPGKWKPKMIGGIGGFIKVKQYDQILIEICGKKAIGTVLVGPTPVNIIGRNMLTQIGCTLNFPISPIETVPVKLKPGMDGPRVKQWPLTEEKIKALTEICTEMEKEGKISKIGPENPYNTPIFAIKKKNSTRWRKLVDFRELNKRTQDFWEVQLGIPHPAGLKKKNSVTVLDVGDAYFSVPLHEDFRKYTAFTIPSTNNATPGIRYQXNVLPQGWKGSPAIFQSSMTKILEPFRSKNPDIIIYQYMDDLYVGSDLEIGQHRAKIEELRSHLLSWGFTTPDQKHQKEPPFLWMGYELHPDKWTVQPIVLPEKESWTVNDIQKLVGKLNWASQIYPGIKVKQLCRLLRGAKALTDIVELTEEAELELAENREILKDPVHGVYYDPSKDLIAEIQKQGQDQWTYQIYQEPFKNLKTGKYARKRSVHTNDVKQLAEMVQKVVTESIVIWGKTPKFKLPIQKETWETWWMDYWQATWIPEWEFVNTPPLVLWWYLLEEDPIVGADSFFVEGAAKEKTLXGTGWFVAEGGRQVVVPLAKTTHQTTELPALHPSLQDSGSVVIIVNDSQSAGGIIQAQPDRSESELVNQIIEKLVGKDKVYLAWVPAHKGIGGNEQVDKLVSSGIRKVLFLDGIDKAQEEHERYHSNWRTMASDFNLPPVIAKEIVASCDKCQLKGEAIHGQVDCSPGIWQLDCTHLEGKVILVAVHVASGYIEAEVIPAETGQETAYFLLKLAGRWPVKVVHTDNGSNFTSAAVKAACWWANIQQEFGIPYNPQSQGVVESMNKELKKIIGQVREQAEHLKTAVQMAVFIHNFKRKGGIGGYSAGERIIDIIATDIQTRELQKQIIKIQNFRVYYRDSRDPIWKGPAKLLWKGEGAVVIQDNSDIKVVPRRKAKIIRDYGKQMAGDDCVAGRQDED

SEQ ID NO: 861 - protein, 1003 aa, Artificial
  HIV Pol
FFRENVAFQQGEARKFSSEQTGANSPTSRAFWDGGRDSLPSEAGAERQGTELTFSFPQITLWQRPLVTVKIGGQLREALLDTGADDTVLEDINLPGKWKPKMIGGIGGFIKVKQYDQILIEICGKKAIGTVLVGPTPVNIIGRNMLTQIGCTLNFPISPIETVPVKLKPGMDGPKVKQWPLTEEKIKALTEICTEMEKEGKISKIGPENPYNTPIFAIKKKDSTKWRKLVDFRELNKRTQDFWEVQLGIPHPAGLKKKKSVTVLDVGDAYFSVPLDESFRKYTAFTIPSTNNETPGVRYQYNVLPQGWKGSPAIFQSSMTKILEPFRLKNPEIIIYQYMDDLYVGSDLEIGQHRTKIEELRAHLLSWGFTTPDKKHQKEPPFLWMGYELHPDKWTVQPIELPEKESWTVNDIQKLVGKLNWASQIYAGIKVKQLCRLLRGAKALTDIVTLTEEAELELAENREILKDPVHGVYYDPSKDLIAEIQKQGLDQWTYQIYQEPFKNLKTGKYARKRSAHTNDVRQLAEVVQKVVMESIVIWGKTPKFKLPIQKETWETWWMDYWQATWIPEWEFVNTPPLVKLWYQLEKDPIAGAETFYVDGAANRETKLGKAGYVTDRGRQKVVSLTETTNQKTELHAIHLALQDSGSEVNIVTDSQYALGIIQAQPDSSESEIVNQIIEKLIGKDKVYLSWVPAHKGIGGNEQVDKLVSSGIRKVLFLDGIDKAQEEHERYHSNWRAMASDFNLPPVIAKEIVASCDKCQLKGEAMHGQVDCSPGIWQLDCTHLEGKVILVAVHVASGYIEAEVIPAETGQETAYFLLKLAGRWPVKIVHTDNGSNFTSAAFKAACWWASIQQEFGIPYNPQSQGVVESMNKELKKIIGQVREQAEHLKTAVQMAVFIHNFKRKGGIGGYSAGERIIDIIATDIQTKELQKQITKIQKFRVYYRDSRDPIWKGPAKLLWKGEGAVVIQDNNDIKVVPRRKAKILRDYGKQMAGDDCVAGRQDED

SEQ ID NO: 862 - protein, 1001 aa, Artificial
  HIV Pol
FFRENLAFQQGEAGKFSSEQTGANSPTSRDLWNEGRDSLPSEAGAEGTRPTFSFPQITLWQRPLVTVKIEGQLKEALLDTGADDTVLEDINLPGKWKPKMIGGIGGFIKVKQYDQVLIEICGKKAIGTVLVGPTPVNIIGRNMLTQIGCTLNFPISPIETVPVKLKPGMDGPKVKQWPLTEEKIKALTEICTEMEKEGKISKIGPENPYNTPIFAIKKKDSTKWRKLVDFRELNKRTQDFWEVQLGIPHPAGLKKKKSVTVLDLGDAYFSVPLHEGFRKYTAFTIPSTNNATPGIRYQYNVLPQGWKGSPAIFQSSMTKILEPFRERNPEVIIYQYMDDLYVGSDLEIGQHRTKIEELREHLLSWGFTTPDKKHQKEPPFLWMGYEVHPDKWTVQPIVLPEKESWTVNDIQKLVGKLNWASQIYAGIKVRQLCKLLRGAKALTDIVTLTEEAELELAENREILKDPVHGAYYDPSKDLIVEIQKQGQDQWTYQIYQETFKNLKTGKYARKRSAHTNDVKQLAEVVQKVAMESIVIWGKTPRSKLPIQKETWETWWIDYWQATWIPEWEFVNTPPLVKLWYQLEKDPIVGAETFYVDGAANRETKLGKAGYVTNRGRQKVVSLTETTNQKTELHAILLALQDSGSEVNIVTDSQYALGIIQAQPDRSESELVNQIIEKLIGKDKVYLSWVPAHKGIGGNEQVDKLVSSGIRKVLFLDGIDKAQEEHERYHSNWRTMASDFNLPPIVAKEIVASCDKCQLKGEAMHGQVDCSPGIWQLDCTHLEGKVILVAVHVASGYIEAEVIPAETGQETAYFILKLAGRWPVKVIHTDNGSNFTSAAVKAACWWANVKQEFGIPYNPQSQGVVESMNKELKKIIGQVREQAEHLKTAVQMAVFIHNFKRRGGIGGYSAGERIIDIIATDIQTKELQKQITKIQNFRVYYRDSRDPIWKGPAKLLWKGEGAVVIQDNSDIKVVPRRKVKIIRDYGKQMAGDDCVAGRQDED

SEQ ID NO: 863 - protein, 1003 aa, Artificial
  HIV Pol
FFRENLAFQQREARKFSSEQTRANSPTSRDLWDGGSDNLPSEAGAERQGTGPTLSFPQITLWQRPLVTVKVGGQLKEALLDTGADDTVLEDINLPGKWRPKMIGGIGGFIKVKQYDQISIEICGKKAIGTVLVGPTPVNIIGRNMLTQIGCTLNFPISPIETVPVKLKPGMDGPKVKQWPLTEEKIKALTEICTEMEKEGKISKIGPENPYNTPIFAIKKKDSNRWRKLVDFRELNKRTQDFWEVQLGIPHPAGLKKKKSVTVLDVGDAYFSVPLDESFRKYTAFTIPSTNNETPGIRYQYNVLPQGWKGSPSIFQSSMTKILEPFRSKNPEIIIYQYMDDLYVGSDLEIGQHRTKIEELRAHLLSWGLTTPDKKHQKEPPFLWMGYELHPDKWTVQPINLPEKESWTVNDIQKLVGKLNWASQIYAGIKVKQLCKLLRGAKALTDIVTLTEEAELELAENREILKAPVHGVYYDPSKDLIAEIQKQGQDQWTYQIYQEPFKNLKTGKYARKRSAHTNDVKQLAEVVQKVVMESIVIWGKTPKFKVPIQKETWETWWMEYWQATWIPEWEFVNTPPLVKLWYQLEKDPIAGAETFYVDGAANRETKLGKAGYVTDRGRQKVVSLTETTNQKTEVHAIHLALQDSGSEVNIVTDSQYALGIIQAQPDSSESELVNQIIEKLIGKDKVYLSWVPAHKGIGGNEQVDKLVSSGIRKVLFLDGIDKAQEEHERYHSNWRAMASDFNLPPVIAKEIVASCNKCQLKGEAMHGQVDCSPGMWQLDCTHLEGKVILVAVHVASGYIEAEVIPAETGQETAYFLLKLAGRWPVKVVHTDNGSNFTSAAFKAACWWANVQQEYGIPYNPQSQGVVESMNKELKKIIGQVREQAEHLKTAVQMAVFIHNFKRKGGIGGYSAGERIIDIIATDIQTKELQKQITKIQNFRVYYRDSRDPIWKGPAKLLWKGEGAVVIQDNSDIKVVPRRKAKIIRDYGKQMAGDDCVAGRQDED

SEQ ID NO: 864 - protein, 998 aa, Artificial
  HIV Pol
FFRENLAFQQGEARKFSSEQTGANSPTSRDLWDGGRDNLPSEAGEERQGVGGTTLNFPQITFWQRPLVTVRIGGMQKEALLDTGADDTVLEDINLPGKWKPKMIGGIGGFIKVKQYDQILIEICGKKAIGTVLVGPTPVNIIGRNMLTQIGCTLNFPISPIETVPVTLKPGMDGPRIKQWPLTEEKIKALTEICREMEKEGKISKIGPENPYNTPVFAIKKKDSTKWRKLVDFRELNKRTQDFWIPHPAGKKKKSVTVLDVGDAYFSVPLDKNFRKYTAFTIPSINNETPGIRYQYNVLPQGWKGSPAIFQSSMIKILEPFRVQNPEIIIYQYMDDLYVGSDLEIGQHRAKVEELRAHLLSWGFTTPDKKHQKEPPFLWMGYELHPDKWTVQPIQLPNKENWTVNDIQKLVGKLNWASQIYVGIKVKQLCKLLRGAKALTDIVTLTEEAELELAENREILKDPVHGVYYDPSKDLIAEIQKQGQDQWTYQIYQEPFKNLKTGKYARKRSAHTNDVRQLVEVVQKVVMESIVIWGKTPKFKLPIQKETWETWWMDYWQATWIPEWEFVNTPPLVKLWYQLEKDPIVGAETFYVDGAANRETKLGKAGYVTDRGRQKVVTLAETTNQKTELHAIYLALQDSGSEVNIVTDSQYALGIIQAQPDRSESELVNQIIEKLIGKDKVYLSWVPAHKGIGGNEQVDKLVSAGVRRILFLDGIDKAQEEHERYHSNWRTMASDFNLPPIVAKEIVASCDKCQLKGEAMHGQVDCSPGMWQLDCTHLEGKVILVAVHVASGYIEAEVIPAETGQETAYFLLKLAGRWPVKVVHTDNGSNFTSAAFKAACWWANVQQEFGIPYNPQSQGVVESMNKELKKIIGQVREQAEHLKTAVQMAVFIHNFKRKGGIGGYSAGERIIDIIATDIQTKELQKQITKIQNFRVYYRDSRDPLWKGPAKLLWKGEGAVLIQDNSDIKVVPRRKAKIIRDYGKQMAGDGCVAGRQDED

SEQ ID NO: 865 - protein, 996 aa, Artificial
  HIV Pol
FFRENLAFPQGEAGKFSSEQTGAISPTSRDDGGRDSLPSEAGAKQPTFSFPQITLWQRPIVTVRIGGQLKEALLDTGADDTVLEDINLPGKWKPKMIGGIGGFIKVRQYDQILIEICGKKAIGTVLVGPTPVNIIGRNMLTQIGCTLNFPISPIETVPVKLKPGMDGPKVKQWPLTEEKIKALTEICTEMEKEGKISKIGPENPYNTPIFAIKKKNSDRWRKLVDFRELNKRTQDFWEVQLGIPHPAGLKKKKSVTVLDVGDAYFSVPLDESFRKYTAFTIPSTNNETPGIRYQYNVLPQGWKGSPAIFQSSMTKILEPFRSKNPEIIIYQYMDDLYVGSDLEIEQHRTKIEELRAHLLSWGFFTPDQKHQKEPPFLWMGYELHPDKWTVQPIKLPEKESWTVNDIQKLVGKLNWASQIYAGIKVKQLCKLLRGAKALTDIVTLTEEAELELAENREILKDPVHGVYYDPSKDLIAEIQKQGQDQWTYQIYQEPFKNLKTGKYARKKSAHTNDVRQLAEVVQKVVMESIVIWGKTPKFKLPIQKDTWDTWWMDYWQATWIPEWEFVNTPPLVKLWYQLEKDPIAGVETFYVDGAANRETKLGKAGYVTDRGRQKVVSLTETTNQKTELHAIHLALQDSGSEVNIVTDSQYALGIIQAQPDKSESELVNQIIEKLIEKDKVYLSWVPAHKGIGGNEQVDKLVSSGIRKVLFLDGIDKAQEEHERYHSNWRTMASDFNLPPIVAKEIVASCDKCQLKGEAMHGQVDCSPGIWQLDCTHLEGKVILVAVHVASGYIEAEVIPAETGQEAAYFLLKLAGRWPVKVVHTDNGSNFTSAAFKAACWWANVQQEFGIPYNPQSQGVVESMNKELKKIIGQVREQAEHLRTAVQMAVFIHNFKRKGGIGGYSAGERIIDIIATDIQTKELQKQITIQNFRVYYRDSRDPIWKGPAKLLWKGEGAVVIQDQSDIKVVPRRKAKIIRDYGKQMAGDDCVASRQDED

SEQ ID NO: 866 - protein, 1003 aa, Artificial
  HIV Pol
FFRENLAFQQREARKFSSEQTRTNSPTSSRDLWDEGRDSLPSEAGAERQGPEPTFSFPQITLWQRPLVTVKIGGQLKKALLDTGADDTVLEDINLPGKWKPKMIGGIGGFIKVKQYDQILIEICGKKAIGTVLVGPTPVNIIGRNMLTLIGCTLNFPISPISTVPVKLKPGMDGPRIKQWPLTEEKIKALTEICADMEREGRISKIGPENPYNTPIFAIKKKDSTKWRKLVDFRELNKRTQDFWEVQLGIPHPAGLKKKKSVTVLDVGDAYFSVPLDESFRKYTAFTIPSTNNETPGIRYQYNVLPQGWKGSPAIFQASMTKILEPFRSKNPDIVIYQYMDDLYVGSDLEIGQHRTKIEELREHLLKWGFTTPDKKHQKEPPFLWMGYELHPDKWTVQPIELPEKESWTVNDIQKLVGKLNWASQIYAGIKVKQLCKLLRGTKALTDIVTLTEEAELELAENREILKDPVHGAYYDPSKDLIAEIQKQGQDQWIYQIYQEPFKNLKTGKYARKRSAHTNDVKQLAEVVQKVVMESIVIWGKTPKFKLPIQKETWETWWMDYWQATIPEWEFVNTPPLVKLWYQLEKDPIAGAETFYVDGAANRETKLGKAGYVTDRGRQKVVSLTETTNQKTELHAIHLALQDSGSEVNIVTDSQYALGIIQAQPDRSESELVNQIIEKLIEKDKVYLSWVPAHKGIGGNEQVDKLVSSGIRKVLFLDGIDKAQEEHERYHSNWRAMASDFNLPPIVAKEIVASCDKCQLKGEAMHGQVDCSPGIWQLDCTHLEGKVILVAVHVASGYVEAEVIPAETGQETAYFLLKLAGRWPVKVVHTDNGSNFTSAAVKAACWWANVKQEFGIPYNPQSQGVVESMNKELKKIIGQVREQAEHLKTAVQMAVFIHNFKRKGGIGGYSAGERIIDIIASDLQTKELQKQITKIQKFRVCYRDSRDPIWKGPAKLLWKGEGAVVIQDNSDIKVVPRRKVKIIKDYGKQMAGDDCVAGRQDED

SEQ ID NO: 867 - protein, 1002 aa, Artificial
  HIV Pol
FFRENLAFQQGEAREFSSEQTRANSPTSRNLWDGGKDDLPCETGAERQGTDSFSFPQITLWQRPLVTVKIGGQLIEALLDTGADDTVLEDINLPGKWKPKIIGGIGGFIKVRQYDQILIEICGKKTIGTVLVGPTPVNIIGRNMLTQIGCTLNFPISPIETVPVKLKPEMDGPKVKQWPLTEEKIKALTEICNEMEKEGKISKIGPENPYNTPVFAIKKKDSTKWRKLVDFRELNKRTQDFWEVQLGIPHTAGLKKKKSVTVLDVGDAYFSVPLDESFRKYTAFTIPSINNETPGVRYQYNVLPQGWKGSPSIFQSSMTKILEPFRSQHPDIVIYQYMDDLYVGSDLEIGQHRAKIEELRAHLLSWGFITPDKKHQKEPPFLWMGYELHPDKWTVQPIQLPEKDSWTVNDIQKLVGKLNWASQIYAGIKVKQLCKLLRGAKALTDIVTLTEEAELELAENREILKDPVHGVYYDPSKDLVAEIQKQGQDQWTYQIYQEPFKNLKTGKYARKRSAHTNDVKQLTEVVQKVSTESIVIWGKIPKFRLPIQKETWEAWWMEYWQATWIPEWEFVNTPPLVKLWYQLEKDPIAGAETFYVDGAANRETKLGKAGYVTDRGRQKVVSLTETTNQKTELHAIHLALQDSGSEVNIVTDSQYALGIIQAQPDRSESEIVNQIIEKLIEKEKVYLSWVPAHKGIGGNEQVDKLVSSGIRKVLFLDGIDKAQEDHEKYHCNWRAMASDFNLPPVVAKEIVASCNKCQLKGEAMHGQVDCSPGIWQLDCTHLEGKVILVAVHVASGYIEAEVIPAETGQETAYFILKLAGRWPVKVIHTDNGSNFTSAAVKAVCWWANIQQEFGIPYNPQSQGVVESMNKELKKIIGQVREQAEHLKTAVQMAVFIHNFKRKGGIGGYSAGERIIDIIATDIQTKELQKQISKIQNFRVYYRDSRDPIWKGPAKLLWKGEGAVVIQDNSDIKVVPRRKAKIIRDYGKQMAGDDCMAGRQDED

SEQ ID NO: 868 - protein, 999 aa, Artificial
  HIV Pol
FFRENLAFPQGEAREFPSEQTRANSPASRELQIRGDNPRTEAGAKRQGTLNFPQITLWQRPLVSIRVGGQTKEALLDTGADDTVLEEINLPGKWKPKMIGGIGGFIKVRQYDQISIEICGKKAIGTVLVGPTPVNIIGRNMLTQLGCTLNFPISPIETVPVKLKPGMDGPKVKQWPLTEEKIKALTAICDEMEKEGKISKIGPENPYNTPIFAIKKKDSTKWRKLVDFRELNKRTQDFWEVQLGIPHPAGLKKKKSVTVLDVGDAYFSVPLYEEFRKYTAFTIPSTNNETPGIRYQYNVLPQGWKGSPAIFQASMTKILEPFRAQNPEIVIYQYMDDLYVGSDLKIGQHRAKIEELREHLLRWGFTTPDKKHQKEPPFLWMGYELHPDKWTVQPIQLPEKDSWTVNDIQKLVGKLNWASQIYPGIKVRQLCRLLRGAKALTDIVPLTEEAELELAENREILKEPVHGVYYDPSKDLIAEIQKQGQDQWTYQIYQEPFKNLKTGKYAKMRTAHTNDVKQLTETVQKIAMESIVIWGKTPKFRLPIQKETWETWWTDYWQATWIPEWEFVNTPPLVKLWYQLEKEPMAGAETFYVDGAANRETKIGKAGYATDRGRQKIVTLTETTNQKTELQAIYLALQDSGSEVNIVTDSQYALGIIQAQPDKSESELVNQIIEQLIKKERVYLSWIPAHKGIGGNEQVDKLVSNGIRRVLFLDGIDKAQEEHERYHSNWRAMASDFNLPPIIAKEIVASCNQCQLKGEAMHGQVDCSPGIWQLDCTHLEGKIILVAVHVASGYIEAEVIPAETGQETAYYILKLAGRWPVKVIHTDNGSNFTSAAVKAACWWAGIQQEFGIPYNPQSQGVVESMNKELKKIIGQVRDQAEHLKTAVQMAVFIHNFKRKGGIGGYSAGERIIDIIATDIQTKELQKQIIKIQNFRVYYRDSRDPIWKGPAKLLWKGEGAVVIQDNSDIKVVPRRKAKIIKDYGKQMAGADCVAGRQDED

SEQ ID NO: 869 - protein, 1000 aa, Artificial
  HIV Pol
FFRENLAFQQGEARKFSPEQTGANSPTSRELWNGGRDSLSSETGAERQGTFNFPQITLWQRPLVTVKIGGQLREALLDTGADDTVLEEINLPGKWKPKMIGGIGGFIKVKQYDQILIEICGKKAIGTVLVGPTSVNIIGRNMLTQIGCTLNFPISPIETVPVALKPGMDGPKVKQWPLTEEKIKALREICTEMEKEGKISKIGPENPYNTPVFAIKKKDSTKWRKLVDFRELNKRTQDFWEVQLGIPHPAGLKKKKSVTVLDVGDAYFSVPLDESFRKYTAFTIPSINNETPGIRYQYNVLPQGWKGSPAIFQNSMTKILEPFRAQNQEIVIYQYMDDLYVGSDLEIGQHRAKIEELREHLLKWGFTTPDKKHQKEPPFLWMGYELHPDKWTVQPIQLPEKDSWTVNDIQKLVGKLNWASQIYPGVKVRQLCKLLRGTKALTDIVPLTEEAELELAENREILKEPVHGVYYDPSKDLIAEIQKQGHDQWTYQIYQEPFKNLKTGKYAKRRTAHTNDVKQLTEAVQKIAMESIVIWGKTPKFRLPIQKETWETWWTDYWQATWIPEWEFVNTPPLVKLWYQLEKEPILGAETFYVDGAANRETKIGKAGYVTDRGRQKIVSLTETTNQKTELQAIQLALQDSGSEVNIVTDSQYALGIIQAQPDSSESEAVNQIIEQLIKKERVYLSWVPAHKGIGGNEQVDKLVSSGIRRVLFLDGIDKAQEEHERYHSNWRAMASDFNLPPIVAKEIVASCDKCQLKGEAMHGQVDCSPGIWQLDCTHLEGKIILVAVHAASGYIEAEVIPAETGQETAYFILKLAGRWPVKVIHTDNGSNFTSNTVKAACWWAGIQQEFGIPYNPQSQGVIESMNKELKKIIGQVRDQAEHLRTAVQMAVFIHNFKRKGGIGGYSAGERIIDIIATDIQTKELQKQITKIQNFRVYYRDSRDPIWKGPAKLLWKGEGAVVIQDNSDIKVVPRRKAKIIRDYGKQMAGDDCVAGRQDED

SEQ ID NO: 870 - protein, 1001 aa, Artificial
  HIV Pol
FFRENLAFQQGEARKFSSEQTGANSPTSRDLRDGGRDNSEAGTDRQGTGPAFSFPQITLWQRPLVTVRIGGQLKEALLDTGADDTVLEDINLPGKWKPKMIGGIGGFIKVKQYDQILIEICGKKAIGTVLVGPTPVNIIGRNMLTQIGCTLNFPISPIETVPVTLKPGMDGPKVKQWPLTEEKIKALTEICTDMEKEGKLSRIGPENPYNTPIFAIKKKDSTKWRKLVDFRELNKRTQDFWEVQLGIPHPAGLKKKKSVTVLDVGDAYFSVPLDKDFRKYTAFTIPSTNNETPGIRYQYNVLPQGWKGSPAIFQSSMTKILAPFRSQNPEIIIYQYMDDLYVGSDLEIGQHRTKIEELRAHLLSWGFTTPDKKHQKEPPFLWMGYELHPDKWTVQPIQLPDKDSWTVNDIQKLVGKLNWASQIYAGIKVKQLCKLLRGTKSLTDVVTLTEEAELELAENREILRDPVHGVYYDPSKDLIAEIQKQGQDQWTYQIYQEPFKNLKTGKYAKKRSAHTNDVRQLAEVVQKVVMESIIIWGKTPKFKLPIQKETWETWWMDYWQATWIPEWEFVNTPPLVKLWYQLEKDPIIGAETFYVDGAANRETKLGKAGYVTDRGRQKVVSLTETTNQKTELHAIQLALQDSGSEVNIVTDSQYALGIIQAQPDRSESEIVNQIIEKLIQKDKVYLSWVPAHKGIGGNEQVDKLVSSGIRKVLFLDGIDKAQEEHERYHSNWRAMASDFNLPPIVAKEIVASCDKCQLKGEAMHGQVDCSPGIWQLDCTHLEGKVILVAVHVASGYIEAEVIPAETGQETAYFLLKLAGRWPVRRVHTDNGSNFTSAAVKAACWWANIQQEFGIPYNPQSQGVVESMNKELKKIIGQVRDQAEHLKTAVQMAVFIHNFKRKGGIGGYSPGERIIDIIATDIQTKELQKQITKIQNFRVYYRDSRDPIWKGPAKLLWKGEGAVVIQDNSDIKVVPRRKVKIIRDYGKQMAGDDCVAGRQDED

SEQ ID NO: 871 - protein, 1003 aa, Artificial
  HIV Pol
FFREDMAFPQGKAREFPSEQTRTNSPTSRELRVWRRDNPLPEAGAERQGTVSFSLPQITLWQRPLVKVKIGGQLKEALLDTGADDTVLEDINLPGKWKPKMIGGIGGFIKVRQYDQILVEICGHKAIGTVLVGPTPVNIIGRNLLTQIGCTLNFPISPIETVPVKLKPGMDGPRVKQWPLTEEKIKALIEICTEMEKEGKISRIGPENPYNTPIFAIKKKDSTKWRKLVDFRELNKRTQDFWEVQLGIPHPAGLKKKKSVTILDVGDAYFSVPLDESFRKYTAFTIPSTNNETPGIRYQYNVLPQGWKGSPAIFQSSMTKILEPFRSKNPDMIIYQYMDDLYVGSDLEIGQHRTKIEELRAHLLSWGFTTPDKKHQKEPPFLWMGYELHPDKWTVQSIKLPEKESWTVNDIQKLVGKLNWASQIYPGIKVKQLCKLLRGAKALTDVVTLTEEAELELAENREILKDPVHGVYYDPSKDLIAEIQKQGQEQWTYQIYQEPFKNLKTGKYAKKRSAHTNDVKQLAEVVQKVVMESIVIWGKAPKFKLPIQKETWETWWMDYWQATWIPEWEFVNTPPLVKLWYQLEKDPIIGAETFYVDGAANRETKLGKAGYVTDRGRQKVVSLTETTNQKTELHAIYLALQDSGSEVNIVTDSQYALGIIQAQPDRSESELVNQIIEKLIGKDKVYLSWVPAHKGIGGNEQVDKLVSSGIRKVLFLDGIDKAQEEHERYHSNWRAMASDFNLPPVIAKEIVASCDKCQIKGEAMHGQVDCSPGIWQLDCTHLEGKVILVAVHVASGYIEAEVIPAETGQETAYFLLKLAGRWPVKVVHTDNGSNFTSAAFKAACWWASVQQEFGIPYNPQSQGVVESMNKELKKIIGQVREQAEHLKTAVQMAVFIHNFKRKGGIGGYSVGERIIDIIATDIQTKELQKQITKIQKFRVYYRDSRNPIWKGPAKLLWKGEGAVVIQDNSDIKVVPRRKAKIIRDYGKQMAGDDCVAGRQDEDW

SEQ ID NO: 872 - protein, 1010 aa, Artificial
  HIV Pol
FFRENLAFQQGEARKFSSEQTRANSPTSRANSPTSRELWEGGRDRLLPEAGTEGQGTISSFNFPQITLWQRPLVTVRLGGQLIEALLDTGADDTVLEQINLPGKWKPKMIGGIGGFIKVRQYDQIMIEICGKKAIGTVLVGPTPVNIIGRNMLTQIGCTLNFPISPIETVPVKLKPGMDGPKVKQWPLTEEKIKALTDICKEMEKEGKISKIGPENPYNTPVFAIKKKDSTKWRKLVDFRELNKRTQDFWEVQLGIPHPAGLKKKRSVTVLDVGDAYFSVPLDKEFRKYTAFTIPSVNNETPGIRYQYNVLPQGWKGSPAIFQASMTKILDPFRRENPEIVIYQYMDDLYVGSDLEIGQHRAKIEELREHLLRWGFTTPDKKHQKEPPFLWMGYELHPDKWTVQPIQLPEKDSWTVNDIQKLVGKLNWASQIYPGIKVRQLCKLLRGAKALTDIVPLTEEAELELAENREILKEPVHGVYYDPAKDLVAEIQKQGQDQWTYQIYQEPFKNLKTGKYAKRSAAHTNDVKQLTEAVQKIAQESIVIWGKTPKFRLPIQRETWEAWWMEYWQATWIPEWEFVNTPPLVKLWYQLEKDPIVGAETFYVDGAASRETKLGKAGYVTDRGRQKAITLTETTNQKTELHAIHLALQDSGSEVNIVTDSQYALGIIQAQPDKSESELVNQIIEQLIRKDRVYLSWVPAHKGIGGNEQVDKLVSSGIRKVLFLDGIDKAQEEHERYHSNWRAMASDFNLPPVIAKEIVASCDKCQLKGEAMHGQVDCSPGIWQIDCTHLEGKVIIVAVHVASGYMEAEVIPAETGQETAYFLLKLAGRWPVRVIHTDNGSNFTSAAVKAACWWANVTQEFGIPYNPQSQGVVESMNKELKKIIGQVRDQAEHLKTAVQMAVFIHNFKRKGGIGGYSARERIIDIIASDIQTKELQKPITKIQNFRVYYRDSRDPIWKGPAKLLWKGEGAVVIQDNSDIKVVPRRKAKIIRDYGKQMAGDGCVAGRQDED

SEQ ID NO: 873 - protein, 1002 aa, Artificial
  HIV Pol
FFRENLAFQQGKAREFPSEQTRANSPSSRELRVWRGDSTFSETGAERQGAVSFSFPQITLWQRPLVTVKIGGQLREALLDTGADDTVLEEINLPGKWKPKMIGGIGGFIKVRQYDQILIEICGYKAIGTVLVGPTPVNIIGRNLLTQIGCALNFPISPIETVPVQLKPGMDGPKVKQWPLTEEKIKALTEICTEMEKEGKIARIGPENPYNTPIFAIKKKDSTKWRKLVDFRELNKRTQDFWEVQLGIPHPAGLKKKKSVTVLDVGDAYFSVPLYEDFRKYTAFTIPSINNETPGIRYQYNVLPQGWKGSPAIFQSSMTKILEPFRKQNPEMVIYQYMDDLYVGSDLEIGQHRIKIEELRGHLLKWGFTTPDKKHQKEPPFLWMGYELHPDKWTVQPITLPEKESWTVNDIQKLVGKLNWASQIYPGIKVRQLCKCIRGAKALTEVVPLTEEAELELAENREILKEPVHGVYYDPSKDLIAEIQKQGQDQWTYQIYQEQYKNLKTGKYAKVRGTHTNDIKQLTAAVQKIAQECIVIWGKTPKFRLPIQKETWETWWTEYWQATWIPEWEFVNTPPLVKLWYQLEKDPMVGAETFYVDGAANRETKLGKAGYVTDRGRQKVVPLTETTNQKTELHAIHLALQDSGSEVNIVTDSQYALGIIQAQPDKSESELVSQIIEQLIKKEKVYLSWVPAHRGIGGNEQVDKLVSNGIRKILFLDGIDKAQEEHEKYHNNWRAMASDFNLPPVVAKEIVASCDKCQLKGEALHGQVDCSPGIWQLDCTHLEGKVILVAVHVASGYIEAEVIPAETGQETAYFLLKLAGRWPVRVVHTDNGSNFTSTAVKAACWWAGIKQEFGIPYNPQSQGVVESMNKELKKIIGQVRDQAEHLRTAVQMAVFIHNFKRKGGIGGYSAGERIIDIIATDIQTKELQRQITKIQNFRVYYRDSRDPIWKGPAKLLWKGEGAVVIQDNSEIKVVPRRKVKIIRDYGKQMAGDDCVASRQDED

SEQ ID NO: 874 - protein, 1003 aa, Artificial
  HIV Pol
FSRENLAFQQGEARKFSSEQTGTNSSTSRNLWDGGRDSLPSEAGAEKQGTGSTLNFPQITLWQRPLVTVKIGGQLKEALLDTGADDTVLEDINLPGKWKPKMIGGIGGFIKVKQYDQILIEICGKKAIGTVLVGPTPVNIIGRNMLTQIGCTLNFPISPIETVPVKLKPGMDGPKVKQWPLTEEKIKALTEICTEMEKEGKISKIGPENPYNTPIFAIKKKNSTRWRKLVDFRELNKRTQDFWEVQLGIPHPAGLKKKKSVTVLDVGDAYFSVPLHEEFRKYTAFTIPSTNNETPGIRYQYNVLPQGWKGSPAIFQSSMTKILEPFRSKNPELIIYQYMDDLYVGSDLEIGQHRIKIEELREHLLKWGFYTPDQKHQKEPPFLWMGYELHPDRWTVQPIKLPEKESWTVNDIQKLVGKLNWASQIYAGIKVKQLCKCLRGAKALTEIVPLTEEAELELAENREILKEPVHGVYYDPSKDLIAEIQKQGQDQWSYQIYQEQYKNLKTGKYAKLRGTHTNDIKQLTAAVQKIAQECIVIWGKTPKFRLPIQKETWETWWTEYWQATWIPEWEFVNTPPLVKLWYQLEKDPIAGVETFYVDGAANRETKLGKAGYITDRGRQKVVSLTDTTNQKTELQAINLALQDSGPEVNIVTDSQYALGIIQAQPDRSESELVNQIIEKLIGKDKVYLSWVPAHKGIGGNEQVDKLVSSGIRKVLFLDGIDKAQEEHERYHSNWRAMASDFNLPPIVAKEIVASCDKCQLKGEAMHGQVDCSPGIWQLDCTHLEGKVILVAVHVASGYIEAEVIPAETGQETAYFILKLAGRWPVKVIHTDNGSNFTSAAVKAACWWAGIQQEFGIPYNPQSQGVVESMNKELKKIIGQVREQAEHLKTAVQMAVFIHNFKRKGGIGGYSAGERIIDIIATDIQTKELQKHITKIQNFRVYYRDSRDPLWKGPAKLLWKGEGAVVIQDNSDIKVVPRRKAKIIRDYGKQMAGDDCVAGRQDED

SEQ ID NO: 875 - protein, 1003 aa, Artificial
  HIV Pol
  misc_feature (117)..(117): Xaa can be any naturally occurring amino acid
  misc_feature (227)..(230): Xaa can be any naturally occurring amino acid
  misc_feature (891)..(891): Xaa can be any naturally occurring amino acid
  misc_feature (918)..(918): Xaa can be any naturally occurring amino acid
FFRENLAFQQRKARELSSEQTGAISPTSRELWDRGRDNLLSEAGTEGQGTAPSLSFPQITLWQRPVVTVKVGGQLKEALLDTGADDTVLEDMNLPGKWKPKMIGGIGGFIKVRQYDXILIEICGKKAIGTVLAGPTPVNIIGRNMLTQIGCTLNFPISPIETVPVKLKPGMDGPKVKQWPLTEEKIKALTEICLEMEKEGKISKIGPENPYNTPVFAIKKKDSTKWXXXXDFRELNKRTQDFWEVQLGIPHPAGLKKKKSVTVLDVGDAYFSVPLAEDFRKYTAFTIPSINNETPGIRYQYNVLPQGWKGSPAIFQCSMTKILEPFRAKNPEIVIYQYMDDLYVGSDLEIGQHRTKIEELREHLLRWGLTTPDKKHQKEPPFLWMGYELHPDKWTVQPIQLPDKESWTVNDIQKLVGKLNWASQIYPGIKVRQLCRLLRGTKALTDIVPLTAEAELELAENREILKEPVHGVYYDPSKDLIAEIQKQGRGQWTYQIYQEPYKNLKTGKYARMKSAHTNDVKQLTEAVQKISIESIVIWGKTPKFRLPIQKETWETWWTEYWQATWIPEWEFVNTPPLVKLWYQLETEPIVGAETFYVDGAANRETKKGKAGYVTDRGRQKVVFLTETTNQKTELQAIHLALQDSGSEVNIVTDSQYALGIIQAQPDKSESDLVNQIIEQLIQKDKVYLTWVPAHKGIGGNEQVDKLVSSGIRKVLFLDGIDKAQEAHEKYHSNWRAMASDFNLPPIVAKEIVASCDKCQLKGEAIHGQVDCSPGIWQLDCTHLEGKIILVAVHVASGYIEAEVIPAETGQETAYFILKLAGRWPVKVIHTDNGSNFISAAVKAACWWADIKQEFGIPYNPQSQGVVESMNKELKKIIGQVREQAEHLKTAXQMAVFIHNFKRKGGIGGYSAGERIIDXIATDIQTKELQKQIIKIQNFRVYYRDSRDPIWKGPAKLLWKGEGAVVIQDNGDIKVVPRRKAKIIRDYGKQMAGDDCVAGRQDED

SEQ ID NO: 876 - protein, 1002 aa, Artificial
  HIV Pol
FFRENLAFPQGKAREFPSEQTRANSPTSRELRVWGGDKTLSETGAERQGIVSFSFPQITLWQRPVVTVRVGGQLKEALLDTGADDTVLEEINLPGKWKPKMIGGIGGFIKVRQYDQILIEICGKKAIGTILVGPTPVNIIGRNMLTQIGCTLNFPISPIETVPVKLKPGMDGPRVKQWPLTEEKIKALTEICKDMEKEGKILKIGPENPYNTPVFAIKKKDSTKWRKLVNFRELNKRTQDFWEVQLGIPHPAGLKKKKSVTVLDVGDAYFSVPLDEDFRKYTAFTIPSINNETPGIRYQYNVLPQGWKGSPAIFQSSMTKILEPFRTKNPEIVIYQYMDDLYVGSDLEIGQHRTKIEELREHLLKWGFTTPDKKHQKEPPFLWMGYELHPDKWTVQPIQLPDKESWTVNDIQKLVGKLNWASQIYPGIKVKQLCKLLRGAKALTDIVPLTAEAELELAENREILKEPVHGVYYDPSKDLIAEIQKQGQGQWTYQIYQEQYKNLKTGKYARIKSAHTNDVKQLTEAVQKIAQESIVIWGKTPKFRLPIQKETWEAWWTEYWQATWIPEWEFVNTPPLVKLWYQLETEPIVGAETFYVDGAANRETKKGKAGYVTDRGRQKVVSLTETTNQKTELQAIHLALQDSGSEVNIVTDSQYALGIIQAQPDKSESEIVNQIIEQLIQKDKVYLSWVPAHKGIGGNEQVDKLVSSGIRKVLFLDGIDKAQEEHEKYHSNWRAMASDFNLPPIVAKEIVASCDKCQLKGEAMHGQVDCSPGIWQLDCTHLEGKIIIVAVHVASGYIEAEVIPAETGQETAYFILKLAGRWPVKVVHTDNGSNFTSAAVKAACWWANIKQEFGIPYNPQSQGVVESMNKELKKIIGQVREQAEHLKTAVQMAVFIHNFKRKGGIGGYSAGERIIDMIATDIQTKELQKQITKIQNFRVYYRDNRDPIWKGPAKLLWKGEGAVVIQDNSDIKVVPRRKAKIIRDYGKQMAGDDCVAGGQDED

SEQ ID NO: 877 - protein, 1003 aa, Artificial
  HIV Pol
  misc_feature (732)..(732): Xaa can be any naturally occurring amino acid
  misc_feature (931)..(931): Xaa can be any naturally occurring amino acid
  misc_feature (936)..(936): Xaa can be any naturally occurring amino acid
FFRENLAFQQGEARKFSSEQTGANSPTSRELGDGGRDNPLSEAGTEGHGTISSLNFPQITLWQRPLVTVRIGGQLIEALLDTGADDTVLAEISLPGKWKPKMIGGIGGFIKVRQYDQILIEICGKKAIGTVLVGPTPVNIIGRNMLTQIGCTLNFPISPIETVPVKLKPGMDGPRVKQWPLTEEKIKALTEICTEMEKEGKISKIGPENPYNTPIFAIKKKGSNRWRKLVDFRELNKRTQDFWEVQLGIPHPAGLKKRKSVTVLDVGDAYFSVPLDESFRKYTAFTIPSINNETPGIRYQYNVLPQGWKGSPAIFQASMTKILEPFRTENPKIVIYQYMDDLYVGSDLEIGQHRAKIDELREHLLRWGLTTPDQKHQKEPPFLWMGYELHPDKWTVQPIQLPEKDSWTVNDIQKLVGKLNWASQIYAGIRVKQLCKLLRGAKALTDIVTLTEEAELELAENREILKEPVHGVYYDPGKELIAEIQKQGQDQWTYQIYQEPFKNLKTGKYAKRKSAHTNDVKQLVEVVQKVATESVVIWGKTPKFRLPIQRETWEAWWREYWQATWIPEWEFVNTPPLVKLWYQLEKDPIAGAETFYVDGAANRETKLGKAGYVTDRGRQKAVSLTETTNQKTELHAIQLALQDSGSEVNIVTDSQYALGIIQAQPDRSESELVNQIIEKLIEKDKVYVSWVPAHKGIGGNEQVDKLVSSGIRKVLFLDGIDKAQADHERYHXNWGAMASDFNLPPIVAKEIVASCDKCQLKGEAIHGQVDCSPGIWQLDCTHLEGKIIIVAVHVASGYIEAEVIPAETGQETAYFILKLAGRWPVKILHTDNGSNFISAAVKAACWWADIKQEFGIPYNPQSQGVVESMNKELKKIIGQVRDQAEHLKTAVQMAVFIHNFKRKGGIGGYSAGERIIDIIASDIQTKELQKXITKIXNFRVYYRDSRDPIWKGPAKLLWKGEGAVAIQDNNEIKVVPRRKAKIIRDYGKQMAGDDCVAGRQDED

SEQ ID NO: 878 - protein, 1002 aa, Artificial
  HIV Pol
FFRENLAFQQGEAREFSSEQARANSPTRRELRVRRGDSPFPEAGAEGKGITSINLPQITLWQRPLVTVRIGGQLIEALLDTGADDTVLEQINLPGKWKPKMIGGIGGFIKVKQYDQILIEIEGKKAIGTVLVGPTPINIIGRNMLTQIGCTLNFPISPIETVPVKLKPGIDGPKVKQWPLTEEKIKALTEICTDMEKEGKISKIGPENPYNTPIFAIKKKDSTKWRKLVDFRELNKRTQDFWEVQLGIPHPAGLKKKRSVTVLDVGDAYFSIPLDENFRKYTAFTIPSINNETPGIRYQYNVLPQGWKGSPAIFQSSMTKILEPFRTENPEIVIYQYMDDLYVGSDLETGQHRAKIEELRNHLLRWGFTTPDKKHQKEPPFLWMGYELHPDKWTVQPIQLPNKESWTVNDIQKLVGKLNWASQIYPGIKVKQLCKLLRGAKALTDIVPLTEEAELELAENREILKEPVHGVYYDPSKELIAELQKQGCDQWTYQIYQEPYKNLKTGKYAKRGSAHTNDVKQLTEAVQKIATESIVIWGKVPKFKLPIRKETWEVWWTEYWQATWIPDWEFVNTPPLVKLWYRLETEPIPGAETYYVDGAANKETKLGKAGYVTDRGKQKIITIQETTNQKTELHAIQLALQDSGSEVNIVTDSQYALGIIQAQPDRSESELVNQIIEQLIKKEKVYLTWVPAHKGIGGNEQVDKLVSSGIRKVLFLDGIDKAQEDHERYHSNWRAMASDFNLPPIVAKEIVASCDKCQLKGEAMHGQVDCSPGIWQLDCTHLEGKVIIVAVHVASGYIEAEVIPAETGQETAYFLLKLAGRWPVKVIHTDNGSNFTSAAMKAACWWANIQQEFGIPYNPQSQGVVESMNKELKKIIGQVRDQAEHLKTAVQMAVFIHNFKRKGGIGGYSAGERIIDIIASDIQTKELQKQIIKIQNFRVYYRDSRDPIWKGPAKLLWKGEGAVVIQDNSEIKVVPRRKVKIIKDYGKQMAGGDCVAGRQDED

SEQ ID NO: 879 - protein, 1002 aa, Artificial
  HIV Pol
FFRENLAFQQGEAREFSPEQTRANSPTSRELRVRRGDSPLPEAGAKGKGAVSFNLPQITLWQRPLVTVKIGGQLIEALLDTGADDTVLEEINLLGKWKPKMIGGIGGFIKVRQYDQVPIEICGKKAIGTVLVGPTPINIIGRNMLTQIGCTLNFPISPIETVPVKLKPGIDGPKVKQWPLTEEKIKALTEICNEMEQEGKISRIGPENPYNTPIFAIKKKDSTKWRKLVDFRELNKRTQDFCEVQLGIPHPAGLKKKKSVTVLDVGDAYFSVPLYEGFRRYTAFTIPSINNETPGIRYQYNVLPQGWKGSPAIFQSSMTKILEPFRKQNPEMVIYQYMDDLYVGSDLEIGQHRAKIEELRAHLLKWGFTTPDKKHQKEPPFLWMGYELHPDKWTVQTVKLPEKDSWTVNDIQKLVGKLNWASQIYSGIKVKQLCKLLRGAKALTDIVPLTEEAELELAENREILKEPVHGVYYDPSKDLVAEVQKQGPDQWTYQIYQEPFKILKTGKYAKKRSAHTNDVKQLTEAVQKIATESIVIWGKIPKFKLPIQKETWETWWTDHWQATWIPEWEFVNTPHLVKLWYQLETEPIVGAETFYVDGAANRETKQGKAGYVTDRGRQKIVSLTETTNQRTELQAIHLALQDSGPEVNIVTDSQYALGIIQAQPDKSESELVNQIIEKLIQKNKVYLSWVPAHKGIGGNEKVDKLVSAGIRKVLFLDGIDKAQEDHERYHSNWKAMASDFNLPPIVAKEIVASCDKCQLKGEAMHGQVDCSPGIWQLDCTHLEGKIILVAVHVASGYIEAEVIPAETGQETAYFILKLAGRWPVKVIHTDNGTNFTSAAVKAACWWANVTQEFGIPYNPQSQGVVESMNKELKKIIGQVRDQAEHLKTAVQMAVFIHNFKRKGGIGGYSAGERIIDIIASDIQTKELQKQIIKIQNFRVYYRDSRDPIWKGPAKLLWKGEGAVVIQDNSEIKVVPRRKAKIIRDYGKQMAGDDCVAGRQDED

SEQ ID NO: 880 - protein, 1003 aa, Artificial
  HIV Pol
FFRENLAFQQGEAREFSSEQTRANSPTRRELRDERGDNLLSEAGTEGQGTIPSFSFPQITLWQRPIVTVKIGGQPIEALLDTGADDTVLEEIKLPGKWKPKMIGGIGGFIKVRQYDQILIEIGEKRAIGTVLVGPTPINIIGRNILTQIGCTLNFPISPIETVPVKLKPGMDGPKVKQWPLTEEKIKALTEICTEMEKEGKISKIGPENPYNTPIFAIKKKDSTKWRKLVDFRELNKRTQDFWEVRLGIPHPARLKKKRSVTVLDVGDAYFSVPLHEDFRKYTAFTIPSINNETPGIRYQYNVLPQGWKGSPAIFQSSMTKILEPFRTKNPEIVIYQYMDDLYVGSDLEIGQHRAKIEELREHLLRWGFTTPDKKHQKEPPFLWMGYELHPDKWTVQPIQLPDKESWTVNDIQKLVGKLNWASQIYPGIKVKQLCKLLRGTKALTDIVPLTAEAELELAENREILKEPVHGVYYDSSKELIAEVQKQGLNQWTYQIYQEPFKNLKTGKYARRRTAHTNDVRQLAEVVQKIASESIVIWGKTPKFRLPIQKETWETWWADYWQATWIPEWEFVNTPLLVKLWYQLEKEPIIGAETFYVDGAANRETKQGKAGYITDKGRQKVITLTETTNQKTELEAIHLALQDSGLEVNIVTDSQYALGIIQAQPDKSESELVSQIIEQLIKKEKVYLSWVPAHKGIGGNEQVDKLVSSGIRKVLFLDGIDKAQEEHERYHCNWRAMASDFNLPPIVAKEIVASCDKCQLKGEAMHGQVDCSPGIWQLDCTHLEGKIILVAVHVASGYIEAEVIPAETGQETAYFILKLAGRWPVKVVHTDNGSNFTSAAVKAACWWANITQEFGIPYNPQSQGVVESMNKELKKIIGQVRDQAEHLKTAVQMAVFIHNFKRKGGIGGYSAGERIVDIIASDIQTKELQNQITKIQNFRVYYRDSRDPIWKGPAKLLWKGEGAVVIQDNSDIKVVPRRKAKIIRDYGKQMAGDDCVAGRQDED

SEQ ID NO: 881 - protein, 1002 aa, Artificial
  HIV Pol
FFRENLAFQQGKAREFSPEQTRANSPTSRELRVWRGDSPLPEAGGEGQGTVSFNFPQITLWQRPLVTIRVAGQVKEALLDTGADDTVLEEMELPGKWKPKMIGGIGGFIKVRQYNDIHIEVEGKKAVGTVLIGPTPINIIGRNMLTQLGCTLNFPISPITTVPVNLKPGMDGPRVRQWPLTEEKIKALTEIFTEMEKEGKISKIGPENPYNTPVFAIKKKDSTKWRKLVDFRELNKRTQDFWEVQLGIPHPAGLKKKKSVTVLDVGDAYFSVPLDENFRKYTAFTIPSVNNETPGIRYQYNVLPQGWKGSPAIFQYSMTKILEPFRANNPEIVIYQYMDDLYVGSDLEIGQHRTKIEELREHLLRWGFTTPDKKHQKEPPFLWMGYELHPDKWTVQPIQLPDKEAWTVNDIQKLVGKLNWASQIYPGIQVRHLCRLLRGAKALTDIVPLTAEAELELAENREILKEPVHGVYYDSAKELIAEVQKQGLDQWTYQIYQEPFKNLKTGKYAKRRAAHTNDVKQLAEVVQKIALESIVIWGKTPKFRLPIQKETWETWWTEYWQATWIPEWEFVNTPPLVKLWYQLEKEPIVGAETFYVDGASNRETKLGKAGYVTDRGRQKIVSLTETTNQKTELHAIYLALQDSGSEVNIVTDSQYALGIIQAQPDKSESELVSQIIEELIKKERVYLSWVPAHKGIGGNEQVDKLVSSGIRKVLFLDGIDKAQEEHEKYHSKWRAMASDFNLPPIVAKEIVASCDKCQLKGEAMHGQVDCSPGIWQLDCTHLEGKVIIVAVHVASGYMEAEVIPAETGQETAYFLLKLAGRWPVTVIHTDNGSNFTSAAVKAACWWAGVRQEFGIPYNPQSQGVVESMNKELKKIIGQVREQAEHLKTAVQMAVFIHNFKRKGGIGGYSAGERIIDMIATDIQTKELQKQIIKIQNFRVYYRDSRDPIWKGPAKLLWKGEGAVVIQDNSEIKVVPRRKAKIIRDYGKQMAGDDCVAGRQDED

SEQ ID NO: 882 - protein, 1003 aa, Artificial
  HIV Pol
FFREDLALPQGKARELSSEQTRANSPTRRELQVWGRDNNSLSEAGADRQGTVSFSFPQITLWQRPIVTIKIGGQLKEALLDTGADDTVLEEMCLPGRWKPKMIGGIGGFIKVRQYDQVLVEICGHKAIGTVLVGPTPVNIIGRNLLTQLGCTLNFPISPIETVPVKLKPGMDGPKVKQWPLTEEKIKALVEICTEMEKEGKISKIGPENPYNTPVFAIKKKDSTKWRKLVDFRELNKRTQDFWEVQLGIPHPAGLKKKKSVTVLDVGDAYFSVPLDKDFRKYTAFTIPSINNETPGIRYQYNVLPQGWKGSPAIFQSSMTKILEPFRKQNPDVVIYQYMDDLYVGSDLEIGQHRTKIEELRQHLLRWGFTTPDKKHQKEPPFLWMGYELHPDKWTVQPIVLPEKDSWTVNDIQKLVGKLNWASQIYSGIKVRQLCKLLRGTKALTEVIPLTEEAELELAENREILKEPVHGVYYDPSKDLIAEVQKQEQGQWTYQIYQEPFKNLKTGKYARMKGAHTNDVKQLTEAVQKIATESIVIWGKTPKFKLPIQKETWEAWWMEYWQATWIPEWEFVNTPPLVKLWYQLEKEPIVGAETFYVDGAANRETKLGKAGYVTDRGRQKVVPLSDTTNQKTELQAIQLALQDSGLEVNIVTDSQYALGIIQAQPDKSESELVNQIIEQLIKKEKIYLAWVPAHKGIGGNDKVDSLVSAGIRKVLFLDGIDKAQDDHEIYHSNWRAMANDFYLPPIVAKDIVASCDKCQQKGEAMHGQVDCSPGLWQLDCTHLEGKVILVAVHVASGYIEAEVIPAETGQETAYFLLKLAGRWPVKTVHTDNGPIFISTAVKAACWWAGIKQEFGIPYNPQRQGVVDSMNNDLTTIIGQVRDQAEHLKTAVQMAVFIHNFKRKGGIGGYSAGERIIDIIASDIQTKELQKQITKVQNFRVYYRDSRDPLWKGPAKLLWKGEGAVVIQDNSDIKVVPRRKAKIIRDYGKQMAGDDCVASRQDED

SEQ ID NO: 883 - protein, 1003 aa, Artificial
  HIV Pol
FFREDLAFPQGKARELSSEQTRANSPTRGELQVWGRDNNSISEAGADRQGTISFSFPQITLWQRPLVTIKVGGQLKEALLDTGADDTVLEDMNLPGRWKPKMIGGIGGFIKVRQYDQIPIEICGHKAIGTVLVGPTPVNIIGRNLLTQLGCTLNFPISPIKTVPVKLKPGMDGPKVKQWPLTEEKIKALVEICTEMEKEGKISKIGPENPYNTPVFAIKKKDSTKWRKLVDFRELNKRTQDFWEAQLGIPHPAGLKKKKSVTVLDVGDAYFSVPLDKDFRKYTAFTIPSVNNETPGIRYQYNVLPQGWKGSPAIFQCSMTKILEPFRKQNPDIVIYQYMDDLYVGSDLEIGQHRAKIEELRQHLLRWGFTTPDKKHQKEPPFLWMGYELHLDKWTVQPIMLPEKDSWTVNDIQKLVGKLNWASQIYAGIKVKELCKLLRGTKALTEVIPLTEEAELELAENREILKESVHGVYYDPSKDLIAEIQKQGLGQWTYQIYQEPYKNLKTGKYARMRGAHTNDVKQLTEAVQKIATESIVIWGKTPKFKLPIQKETWEAWWTEYWQATWIPEWEFINTSPLVKLWYQLEKEPIEEAETFYVDGAANRETKLGKAGYVTNKGRQKVVTLTDTTNQKTELQAIYLALQDSGVEVNIVTDSQYALGIIQAQPDKSESELVSQIIEQLIKKEKVYLAWVPAHKGIGGNEQIDKLVSAGIRKVLFLDGIDKAQEEHEKYHCNWRAMASDFNLPPVVAKEIVASCDKCQLKGEAMHGQVDCSPGIWQLDCTHLEGKIILVAVHVASGYIEAEVIPAETGQETAYFLLKLAGRWPVKTIHTDNGRNFTSNSVKAACWWAGIKQEFGIPYNPQSQGVVESMDKELKKIIGQVRDQAEHLKTAVQMAVFIHNFKRKGGIGGYSAGERIVDIIATDIQTRELQKQITKIQNFRVYYRGSRDPLWKGPAKLLWKGEGAVVIQDNSDIKVVPRRKVKIIRDYGKQMAGDDCVASRQDED

SEQ ID NO: 884 - protein, 1003 aa, Artificial
  HIV Pol
FFREDLAFLQGKAREFSSAQTRANSPTRRELQVWGRDSNSLSEAGADRQGTVSFSFPQITLWQRPLVTIKIGGQLKEALLDTGADDTVLEEMSLPGRWKPKMIGGIGGFIKVRQYDQILIEICGHKAIGTVLVGPTPVNIIGRNLLTQIGCTLNFPISPIETVPVKLKPGMDGPKVKQWPLTEEKIKALVEICTEMEKEGKISKIGPENPYNTPVFAIKKKDSTKWRKLVDFRELNKRTQDFWEVQLGIPHPAGLKKKKSVTVLDVGDAYFSVPLDEDFRKYTAFTIPSINNETPGVRYQYNVLPQGWKGSPAIFQSSMTKILEPFRKQNPDIVIYQYMDDLYVGSDLEIGQHRTKIEELRQHLLRWGFTTPDKKHQKEPPFLWMGYELHPDKWTVQPITLPEKDSWTVNDIQKLVGKLNWASQIYAGIKVRQLCKLLRGAKALTEVIPLTKEAELELAENREILKEPVHGVYYDPSKDLIAEIQKQGQGQWTYQIYQEPFKNLKTGKYARMRGAHTNDVKQLTEAVQKITTESIVIWGKTPKFKLPIQKETWEAWWTEYWQATWIPEWEFVNTPPLVKLWYQLETEPIVGAETFYVDGAANRETKLGKAGYVTDRGRQKVVSLTDTTNQKTELQAIHLALQDSGLEVNIVSDSQYAIGIIQAQPDKSESELVSQIIEQLIKKEKVYLTWVPAHKGIGGNEQVDKLVSAGIRKVLFLDGIDKAQDEHEKYHSNWRAMASDFNLPPVVAKEIVASCDKCQLKGEAMHGQVDCSPGIWQLDCTHLEGKVILVAVHVASGYIEAEVIPAETGQETAYFILKLAGRWPVKTIHTDNGSNFTSTTVKAACWWAGVKQEFGIPYNPQSQGVVESMNKELKKIIGQVRDQAEHLKTAVQMAVFIHNFKRKGGIGGYSAGERIVDIIATDIQTKELQKQITKIQNFRVYYRDSRDPLWKGPAKLLWKGEGAVVIQDNSEIKVVPRRKAKIIRDYGKQMAGDDCVAGRQDED

SEQ ID NO: 885 - protein, 1002 aa, Artificial
  HIV Pol
FFREDLAFPQGEARKFSSEQTRANSPTRRELQVWGSNSSLSEAGADRQGTVSLSLPQITLWQRPLVTIKIGGQLKEALLDTGADDTVVEEMSLPGRWKPKMIGGIGGFIKVRQYDQILVEICGHKAIGTVLVGPTPVNIIGRNLLTQIGCTLNFPISPIETVPVKLKPGMDGPKVKQWPLTEEKIKALIEICTEMEKEGKISKIGPENPYNTPVFAIKKKDSTKWRKLVDFRELNKRTQDFWEVQLGIPHPAGLKKKKSVTVLDVGDAYFSVPLDKDFRKYTAFTIPSINNETPGIRYQYNVLPQGWKGSPAIFQSSMTKILEPFRKQNPDIVIYQYMDDLYVGSDLEIEQHRTKIEELRQHLLKWGFTTPDKKHQKEPPFLWMGYELHPDKWTVQPIVLPEKDSWTVNDIQKLVGKLNWASQIYAGIKVKQLCKLLRGPKALTEVIPLTKEAELELAENREILKEPVHGVYCDPSKDLVAEIQKQGEGQWTYQIYQEPFKNLKTGKYARMRGAHTNDIKQLTEAVQKIATEGIVIWGKTPKFRLPIQKETWEAWWTEYWQATWIPEWEFVNTPPLVKLWYQLEKEPIVGAETFYVDGAANRETKLGKAGYVTDRGRQKVVSLNDTTNQKTELQAIHLALQDSGLEVNIVTDSQYALGIIQAQPDKSESELVSQIIEQLIKKEKVYLAWVPAHKGIGGNEQVDKLVSAGIRKVLFLDGIDKAQEDHEKYHSNWRAMANDFNLPPVVAKEIVASCDKCQLKGEAMHGQVDCSPGIWQLDCTHLEGKIILVAVHVASGYIEAEVIPVETGQETAYFLLKLAGRWPVKTVHTDNGPNFTSTTVKAACWWAGIKQEFGIPYNPQSQGVVESMNKELKKIIGQVRDQAEHLKTAVQMAVFIHNFKRKGGIGGYSAGERIVDIIATDIQTKELQKQITKIQNFRVYYRDSREPFWKGPAKLLWKGEGAVVIQDNSDIKVVPRRKAKIIRDYGKQMGSDDCVASRQDED

SEQ ID NO: 886 - protein, 1003 aa, Artificial
  HIV Pol
FFREDLAFLQGKAREFSSEQTRANSPTRRELQVWGRDNNSPSEAGADRQGTVSFNFPQVTLWQRPLVTIKIGGQLKEALLDTGADDTVLEEMSLPGRWKPKMIGGIGGFIKVRQYDQILIEICGHKAIGTVLVGPTPVNIIGRNLLTQIGCTLNFPISPIETVPVKLKPGMDGPKVKQWPLTEEKIKALVEICTEMEKEGKISKIGPENPYNTPVFAIKKKDSTKWRKLVDFRELNKRTQDFWEVQLGIPHPAGLKKKKSVTVLDVGDAYFSVPLDEDFRKYTAFTIPSINNETPGIRYQYNVLPQGWKGSPAIFQSSMTKILEPFRKQNPDIVIYQYMDDLYVGSDLEIGQHRTKIEELRQHLLRWGLTTPDKKHQKEPPFLWMGYELHPDKWTVQPIVLPEKDSWTVNDIQKLVGKLNWASQIYPGIKVRQLCKLLRGTKALTEVIPLTEEAELELAENREILKEPVHGVYYDPSKDLIAEIQKQGQGQWTYQIYQEPFKNLKTGKYARMRGAHTNDVKQLTEAVQKITTESIVIWGKTPKFKLPIQKETWETWWTEYWQATWIPEWEFVNTPPLVKLWYQLEKEPIVGAETFYVDGAANRETKLGKAGYVTNRGRQKVVTLTDTTNQKTELQAIYLALQDSGLEVNIVTDSQYALGIIQAQPDQSESELVNQIIEQLIKKEKVYLAWVPAHKGIGGNEQVDKLVSAGIRKVLFLDGIDKAQDEHEKYHSNWRAMASDFNLPPVVAKEIVASCDKCQLKGEAMHGQVDCSPGIWQLDCTHLEGKVILVAVHVASGYIEAEVIPAETGQETAYFLLKLAGRWPVKTIHTDNGSNFTGATVRAACWWAGIKQEFGIPYNPQSQGVVESMNKELKKIIGQVRDQAEHLKTAVQMAVFIHNFKRKGGIGGYSAGERIVDIIATDIQTKELQKQITKIQNFRVYYRDSRNPLWKGPAKLLWKGEGAVVIQDNSDIKVVPRRKAKIIRDYGKQMAGDDCVASRQDED

SEQ ID NO: 887 - protein, 1003 aa, Artificial
  HIV Pol
FFREDLAFPQGKAREFSSEQTRANSPTSRELRVWGRDNNSPSEAGADRQGTVSFNLPQITLWQRPIVTIKIGGQLKEALLDTGADDTVLEEMNLPGRWKPKMIGGIGGFIKVRQYDQILIEICGHKAIGTVLVGPTPVNIIGRNLLTQLGCTLNFPISPIETVPVKLKPGMDGPKVKQWPLTEEKIKVLIEICTEMEKEGKISKVGPENPYNTPVFAIKKKDSTKWRKLVDFRELNKRTQDFWEVQLGIPHPAGLKKKKSVTVLDVGDAYFSVPLDKDFRKYTAFTIPSINNETPGIRYQYNVLPQGWKGSPAIFQSSMTKILEPFRKQNPDIVIYQYMDDLYVGSDLEIGQHRTKIEELRQHLLRWGFTTPDKKHQKEPPFLWMGYELHPDKWTVQPIMLPEKDSWTVNDIQKLVGKLNWASQIYAGIKVKNLCKLLRGTKALTEVIPLTEEAELELAENREILKEPVHGVYYDPSKDLVAELQKQGQGQWTYQIYQEPFKNLKTGKYARMRGAHTNDVKQLTEAVQKITQESIVIWGKTPKFKLPIQKETWEAWWTEYWQATWIPEWEFVNTPPLVKLWYQLEKDPIVGAETFYVDGAANRETKLGKAGYVTDRGRQKVVSLTDTTNQKTELQAIHLALQDSGLEVNIVTDSQYALGIIQAQPDKSESELVSQIIEQLIKKEKVYLAWVPAHKGIGGNEQVDKLVSAGIRKVLFLDGIDKAQEEHEKYHSNWRAMASDFNLPPVVAKEIVASCDKCQLKGEAMHGQVDCSPGIWQLDCTHLEGKIILVAVHVASGYIEAEVIPAETGQETAYFILKLAGRWPVKTIHTDNGSNFTSTTVKAACWWAGIKQEFGIPYNPQSQGVVESMNNELKKIIGQVRDQAEHLKTAVQMAVFIHNFKRKGGIGGYSAGERIVDIIATDIQTKELQKQITKIQNFRVYYRDSREPLWKGPAKLLWKGEGAVVIQDNSDIKVVPRRKAKIIRDYGKQMAGDDCVASRQDED

SEQ ID NO: 888 - protein, 1003 aa, Artificial
  HIV Pol
FFRENLAFPQGEAREFSSEQTRANSPTRRELQVWGRENNSLSEAGADRQGTVSFSFPQITLWQRPLVTIKIGGQLKEALLDTGADDTVLEEMNLPGRWKPKMIGGIGGFIKVRQYDQIPIEICGHKAIGTVLVGPTPVNIIGRNLLTQIGCTLNFPISPIETVPVKLKPGMDGPKVKQWPLTEEKIKALVEICTEMEKEGKISKIGPENPYNTPVFAIKKKDSTKWRKLVDFRELNKRTQDFWEVQLGIPHPAGLKKKKSVTVLDVGDAYFSVPLDKDFRKYTAFTIPSTNNETPGIRYQYNVLPQGWKGSPAIFQSSMTKILEPFRKQNPDIVIYQYMDDLYVGSDLEIGQHRTKIEELRQHLLRWGLTTPDKKHQKEPPFLWMGYELHPDKWTVQPIMLPEKDSWTVNDIQKLVGKLNWASQIYAGIKVKQLCKLLRGTKALTEVVPLTEEAELELAENREILKEPVHGVYYDPSKDLIAELQKQGQGQWTYQIYQEPFKNLKTGKYAKMRGTHTNDVKQLTEAVQKIATESIVIWGKTPKFKLPIQKETWDAWWIDYWQATWIPEWEFVNTPPLVKLWYQLEKEPIVGAETFYVDGAANRETRLGKAGYVTDRGRQKVVPLTDTTNQKTELQAIYLALQDSGLEVNIVTDSQYALGIIQAQPDKSESELVSQIIEELIKKEKVYLAWVPAHKGIGGNEQVDKLVSAGIRKVLFLDGIDKAQEEHEKYHSNWRAMASDFNLPPVVAKEIVASCDKCQLKGEAMHGQVDCSPGIWQLDCTHLEGKVILVAVHVASGYIEAEVIPAETGQETAYFLLKLAGRWPVKTIHTDNGGNFISTTVKAACWWAGIKQEFGIPYNPQSQGVVESMNNELKKIIGQVRDQAEHLKTAVQMAVFIHNFKRKGGIGGYSAGERIIDIIATDIQTKELQKQITKIQNFRVYYRDSRDPLWKGPAKLLWKGEGAVVIQDNSDIKVVPRRKAKIIRDYGKQMAGDDCVASRQDED

SEQ ID NO: 889 - protein, 1009 aa, Artificial
  HIV Pol
FFREDLAFPQGKAREFSPEQTRANSPTRADSPTRRELQVRGRDNNSLTETGADKQGTVSFSFPQITLWQRPIVTIKIGGQLKEALLDTGADDTVLEDMNLPGRWKPKMIGGIGGFIKVKQYDQILVEICGHKAIGTVLVGPTPVNIIGRNLLTQLGCTLNFPISPIETVPVKLKPGMDGPKVKQWPLTEEKIKALVEICTEMEKEGKISKIGPENPYNTPVFAIKKKDSTKWRKLVDFRELNKRTQDFWEVQLGIPHPSGLKKKKSVTVLDVGDAYFSVPLDKEFRKYTAFTIPSINNETPGIRYQYNVLPQGWKGSPAIFQSSMTKILEPFRKQNPEIVIYQYMDDLYVGSDLEIGQHRTKIEELRQHLLRWGFSTPDKKHQKEPPFLWMGYELHPDKWTVQPIVLPEKDSWTVNDIQKLVGKLNWASQIYPGIKVRQLCKLLRGAKALTEVITLTEEAELELAENREILKEPVHGVYYDPSKDLVAEIQKQGLGQWTYQIYQEPFKNLKTGKYAKMRGAHTNDVKQLTEAVQKIATESIVIWGKTPKFKLPIQKETWEAWWMEYWQATWIPEWEFVNTPPLVKLWYQLEKEPIIGAETFYVDGAANRETKLGKAGYVTDRGRQKVVPLTDTTNQKTELQAIHLALQDSGLEVNIVTDSQYALGIIQAQPDRSESEVVSQIIEQLIKKEKVYLAWVPAHKGIGGNEQVDKLVSSGIRKILFLDGIDKAQEDHEKYHSNWRAMANDFNLPPVVAKEIVASCDKCQLKGEAMHGQVDCSPGIWQLDCTHLEGKIILVAVHVASGYIEAEVIPAETGQDTAYFILKLAGRWPVKTIHTDNGRNFTSTTVKAACWWAGIKQEFGIPYNPQSQGVVESMNKELKKIIGQVRDQAEHLKTAVQMAVFIHNFKRKGGIGGYSAGERIVDIIATDIQTKELQKQITKIQNFRVYYRDSRDPLWKGPAKLLWKGEGAVVIQDNSDIKVVPRRKAKIIRDYGKQMAGDDCVASRQDED

SEQ ID NO: 890 - protein, 1003 aa, Artificial
  HIV Pol
FFREDLALPQGKAREFSSEQTRANSPTRGELQVWGRDNNSCSEAGTDRQGTVSLSFPQTTLWQRPLVTIKIGGQLKEALLDTGADDTVLEEMNLPGRWKPKMIGGIGGFIKVRQYDQILIEICGHKAIGTVLVGPTPVNIIGRNLLTQIGCTLNFPISPIETVPVKLKPGMDGPKVKQWPLTEEKIKALVEICTEMEKEGKISKIGPENPYNTPVFAIKKKDSTKWRKLVDFRELNKRTQDFWEVQLGIPHPAGLKKKKSVTVLDVGDAYFSVPLYEDFRKYTVFTIPSINNEAPGVRYQYNVLPQGWKGSPAIFQSSMTKILEPFRKQNPDVVIYQYMDDLYVGSDLEIGQHRTKIEELRQYLLKWGFTTPDKKHQKEPPFLWMGYELHPDKWTVQPITLPEKDSWTVNDIQKLVGKLNWASQIYPGIKVKQLCKLLRGAKALTEVIPLTKEAELELAENREILKVPVHGVYYDPSKDLTAEIQKQGQGQWTYQIYQEPFRSLKTGKYAKMRGTHTNDVKQLTEAVQKVTTESIIIWGKIPKFKLPIQKETWDAWWTEYWQATWIPEWEFVNTPPLVKLWYQLEKEPIVGAETFYVDGAANRETKLGKAGYVTDRGRQKVISLTDTTNQKTELQAIHLALQDSGLEVNIVSDSQYALGIIQAQPDKSESELVSQIIEQLIKKEKVYLAWVPAHKGIGGNEQVDKLVSAGIRKVLFLDGIDKAQEEHEKYHSNWRAMASDFNLPPVVAKEIVASCDKCQLKGEAMHGQVDCSPGIWQLDCTHLEGKVILVAVHVASGYIEAEVIPAETGQETAYFLLKLAGRWPVTTIHTDNGSNFTSTTVKAACWWAGIKQEFGIPYNPQSQGVVESMNKELKKIIGQVRDQAEHLKTAVQMAVFIHNFKRKGGIGGYSAGGRIVDIIATDIQTKELQKQITKIQNFRVYYRDSRNPLWKGPAKLLWKGEGAVVIQDNSEIKVVPRRKVKIIRDYGKQMAGDDCVAGRQDED

SEQ ID NO: 891 - protein, 1002 aa, Artificial
  HIV Pol
FFREDLAFPQGKAREFPSEQTRAISPARRELQVWGRDNNSLSEAGANRQGTVSFSFPQITLWQRPLVAIKIGGQLKEALLDTGADDTVLEEMSLPGRWKPKMIGGIGGFIKVRQYDQVAIEICGHKAIGTVLIGPTPVNIIGRNLLTQIGCTLNFPISPIETVPVKLKPGMDGPKVKQWPLTEEKIKALVEICTEMEKEGKISKIGPENPYNTPVFAIKKKDSTKWRKLVDFRELNKRTQDFWEVQLGIPHPAGLKKKKSVTVLDVGDAYFSVPLDEDFRKYTAFTIPSTNNETPGIRYQYNVLPQGWKGSPAIFQSSMTKILEPFRKQNPDIVIYQYMDDLYVGSDLEIGQHRIKIEELRQHLLRWGFTTPDKKHQKEPPFLWMGYELHPDKWTVQPIVLPEKDSWTVNDIQKLVGKLNWASQIYAGIKVKQLCKLLRGTKALTEVVPLTEEAELELAENREILKEPVHGVYYDPAKDLIAEIQKQGQGQWTYQIYQEPFKNLKTGKYARMRGAHTNDVKQLTEAVQKVAIESIVIWGKTPKFKLPIQKETWEAWWTEYWQATWIPEWEFVNTPPLVKLWYQLEKEPIVGAETFYVDGAANRETKLGKAGYVTDRGRQKVVPLTDTTNQKTELQAIHLALQDSGLEVNIVTDSQYALGIIQAQPDKSESELVSQIIEQLIKKEKVYLAWVPAHKGIGGNEQVDKLVSAGIRKVLFLDGIDKAQEEHEKYHSNWRAMAGDFNLPPVVAKEIVACCDKCQLKGEAMHGQVDCSPGIWQLDCTHLEGKVILVAVHVASGYIEAEVIPAETGQETAYFLLKLAGRWPVKTIHTDNGSNFTSNTVKAACWARIKQEFGIPYNPQSQGVVESMNKELKKIIGQVRDQAEHLKTAVQMAVFIHNFKRKGGIGGYSAGERIIDIIATDIQTKELQKQVTKIQNFRVYYRDSRDPLWKGPAKLLWKGEGAVVIQDNSDIKVVPRRKAKIIRDYGKQMAGDDCVASRQDED

SEQ ID NO: 892 - protein, 1003 aa, Artificial
  HIV Pol
FFREDLAFPQGKAREFSSEQTRANSPTRRELQVWGRDNNSLSEAGAEGQGTVSLSLPQITLWQRPLVTIKIGGQLKEALLDTGADDTVLEEMNLPGRWKPKMIGGIGGFIKVRQYDQIPIEICGHKAIGTVLVGPTPVNIIGRNLLTQIGCTLNFPISPIETVPVKLKPGMDGPKVKQWPLTEEKIKALVEICTEMEKEGKISKIGPENPYNTPVFAIKKKDSTKWRKLVDFRELNKRTQDFWEVQLGIPHPAGLKKKKSGTALDVGDAYFSVPLDKDFRKYTAFTIPSVNNETPGIRYQYNVLPQGWKGSPAIFQCSMTKILEPFRKQNPDIVIYQYMDDLYVGSDLEIGQHRTKIEELRQHLLRWGFTTPDKKHQKEPPFLWMGYELHPDKWTVQPIVLPEKDSWTVNDIQKLVGKLNWASQIYAGIKVRHLCKLLRGTKALTEVIPLTEEAELELAENREILKEPVHGVYYDPSKELIAEIQKQGQGQWTYQIYQEPFKNLKTGKYARMRGAHTNDVKQLTEAVQKITTESIVIWGKTPKFKLPIQKETWEAWWTEYWQATWIPEWEFVNTPPLVKLWYQLEKEPIVGAETFYVDGAANRETKLGKAGYVTDRGRQKVVSLNDTTNQKTELQAINLALQDSGLEVNIVTDSQYALGIIQAQPDKSESELVSQIIEQLIKKEKVYLAWVPAHKGIGGNEQVDKLVSAGIRKVLFLDGIDKAQEEHEKYHSNWRAMASDFNLPPVVAKEIVASCDKCQLKGEAMHGQVDCSPGIWQLDCTHLEGKIILVAVHVASGYIEAEVIPAETGQETAYFILKLAGRWPVTTIHTDNGSNFTSATVKAACWWAGIKQEFGIPYNPQSQGVVESMNKELKKIIGQVRDQAEHLKTAVQMAVFIHNFKRKGGIGGYSAGERIVDIIATDIQTKELQKQITKIQNFRVYYRDSRDPLWKGPAKLLWKGEGAVVIQDNSDIKVVPRRKAKIIRDYGKQMAGDDCVASRQDED

SEQ ID NO: 893 - protein, 1003 aa, Artificial
  HIV Pol
FFRENLAFPQGKARKFSSEQTRANSPTRGELQVWGTDNNSLSEAGADRQGPVSFSFPRITLWQRPLVTIRIGGQLKEALLDTGADDTVLEEMNLPGKWKPKMIGGIGGFIKVRQYDQIPIEICGHKAIGTVLVGPTPVNIIGRNLLTQIGCTLNFPISPIDTVPVKLKPGMDGPKVKQWPLTEEKIKVLIEICTEMEKEGKISKIGPENPYNTPVFAIKKKDSTKWRKLVDFRELNKRTQDFWEVQLGIPHPAGLKKKKSVTVLDVGDAYFSVPLDKDFRKYTAFTIPSINNETPGIRYQYNVLPQGWKGSPAIFQSSMTRILEPFRKQNPDIVIYQYMDDLYVGSDLEIGQHRIKVEELRQHLLRWGFTTPDKKHQKEPPFLWMGYELHPDKWTVQPIVLPEKDSWTVNDIQKLVGKLNWASQIYAGIKVRQLCKLLRGTKALTEVVPLTKEAELELAENREILKQPVHGAYYDPSKDLVAEIQKQGQGQWTYQIYQETFKNLKTGKYARTRGAHTNDVKQLTEAVQKIATESIVIWGKTPKFKLPIQKETWEAWWTEYWQATWIPEWEFVNTPPLVKLWYQLEKEPIIGAETFYVDGAANRETKLGKAGYVTDKGRQKVVSLTDTTNQKTELQAIHLALQDSGLEVNIVTDSQYALGIIQAQPDKSESELVSQIIEELIKKEKVYLTWVPAHKGIGGNEQVDKLVSAGIRKVLFLDGIDRAQEEHEKYHSNWRAMASDFNLPPVVAKEIVASCDKCQLKGEAMHGQVDCSPGIWQLDCTHLEGKIILVAVHVASGYIEAEVIPAETGQETAYFLLKLAGRWPVKTIHTDNGSNFTSAAVKAACWWAGIKQKFGIPYNPQSQGVIESMNKELKKIIGQVRDQAEHLKTAVQMAVFIHNFKRKGGIGGYSAGERIVDIIATDIQTKELQKQITKIQNFRVYYRDNRDPLWKGPAKLLWKGEGAVVIQDNSDIKVVPRRKAKIIRDYGKQMAGDDCVAGRQDED

SEQ ID NO: 894 - protein, 1003 aa, Artificial
  HIV Pol
FFREDLAFPQGKAREFSSEQTRANSSTRRELQVWGGDNNSPSEAGAGRQGNVSLSFPQITLWQRPLVTIKIGGQLKEALLDTGADDTVLEEMNLPGRWKPKMIGGIGGFIKVRQYDQIPIEICGHKAIGTVLVGPTPVNIIGRNLLTQIGCTLNFPISPIETVPVKLKPGMDGPKVKQWPLTEEKIKALVEICTEMEKEGKISKIGPENPYNTPVFAIKKKDSTKWRKLVDFRELNKRTQDFWEVQLGIPHPAGLKKKKSVTVLDVGDRYFSVPLDKDFRKYTAFTIPSINNETPGIRYQYNVLPQGWKGSPAIFQSSMTKILEPFRKQNPDIVIYQYMDDLYVGSDLEIGQHRTKIEELRQHLLRWGFTTPDKKHQKEPPFLWMGYELHPDKWTVQPIVLPEKDSWTVNDIQKLVGKLNWASQIYSGIKVKQLCKLLRGTKALTEVVTLTEEAELELAENREILKEPVHGVYYDPSKDLIAEIQKQGQGQWTYQIYQEPFKNLKTAKYARTRGAHTNDVKQLTEAVQKITTECIIIWGKTPKFRLPIQKETWETWWTEYWQATWIPEWEFVNTPPLVKLWYQLEKEPIEGAETFYVDGAANRETKLGKAGYVTNKGRQKVVTLTDTTNQKTELEAIHLALQDSGLEVNIVTDSQYALGIIQAQPDKSESELVSQIIEQLIKKEKVYLAWVPAHKGIGGNEQVDKLVSAGVRKVLFLDGIDKAQEEHEKYHSNWRAMASDFNLPPVVAKEIVASCDKCQLKGEAMHGQVDCSPGIWQLDCTHLEGKIILVAVHVASGYIEAEVIPAETGQETAYFLLKLAGRWPVKTIHTDNGSNFTSTTVKAACWWAGIKQEFGIPYNPQSQGVVESMNKELKKIIGQVRDQAEHLKTAVQMAVFIHNFKRKGGIGGYSAGERIVDIIATDIQTKELQKQITKIQNFRVYYRDNKDPLWKGPAKLLWKGEGAVVIQDNSDIKVVPRRKAKIIRDYGKQMAGDDCVASRQDED

SEQ ID NO: 895 - protein, 1001 aa, Artificial
  HIV Pol
FFRENLAFPQGKAREFSSEQTRAISPTRRELQVWGGDSNSLSEAGAEGTISLSLPQITLWQRPLVKIKIGGQLKEALLDTGADDTVLEEINLPGKWKPKMIGGIGGFIKVRQYDQVLIEICGHKAIGTVLVGPTPVNIIGRNLLTQIGCTLNFPISPIETVPVKLKPGMDGPRVKQWPLSEEKIKALTEICTEMEKEGKISKIGPENPYNTPIFAIKKKNSTRWRKLVDFRELNKRTQDFWEVQLGIPHPAGLKKKKSVTVLDVGDAYFSIPLDEDFRKYTAFTIPSVNNAAPGIRYQYNVLPQGWKGSPAIFQSSMTKILEPFRKQNPDIVIYQYMDDLYVGSDLEIEQHRTKIEELRQHLLRWGLFTPDQKHQKEPPFLWMGYELHPDKWTVQPIVLPEKDSWTVNDIQKLVGKLNWASQIYAGIKVKQLCKLLRGAKALTEVIPLTEEAELELAENREILKEPVHGVYYDPSKDIIAEIQKQGQGQWTYQIYQEPFKNLKTGKYARTRGAHTNDVKQLTEVVQKVTTECIVIWGKTPKFRLPIQKETWETWWTEYWQATWIPEWEFVNTPPLVKLWYQLEKEPIVGAETFYVDGAASRETRLGKAGYVTNRGRQKVVSLTDTTNQKTELQAIYLALQDSGLEVNIVTDSQYALGIIQAQPDKSESELVNQIIEQLIKKEKVYLAWVPAHKGIGGNEQVDKLVSTGIRRVLFLDGIEKAQEEHEKYHSNWRAMASEFNLPAVVAKEIVACCDKCQVKGEAMHGQVDCSPGIWQLDCTHLEGKVILVAVHVASGYIEAEVIPAETGQETAYFILKLAGRWPVKTIHTDNGSNFTSTTVKAACWWAGIKQEFGIPYNPQSQGVVESMNKELKKIIEQVRDQAEHLKTAVQMAVFIHNFKRKGGIGGYSAGERIVDIIASDIQTKELQKQITKIQNFRVYYRDSRDPLWKGPAKLLWKGEGAVVIQDKSDIKVVPRRKAKIIRDYGKQMAGDDCVASRQDED

SEQ ID NO: 896 - protein, 1007 aa, Artificial
  HIV Pol
FFREDLAFLQGKAREFPSEQTRANSPTRRELQVWGRDSNSLSEAGAEAGADRQGIVSFNFPQITLWQRPLVTIKIGGQLKEALLDTGADDTVLEDMDLPGRWKPKMIGGIGGFIKVRQYDQIPIDICGHKAVGTVLVGPTPVNIIGRNLLTQIGCTLNFPISPIETVPVKLKPGMDGPKVKQWPLTEEKIKALVEICTEMEKEGKISKIGPENPYNTPVFAIKKKDSTKWRKLVDFRELNRRTQDFWEVQLGIPHPAGLKKKKSVTVLDVGDAYFSVPLDKDFRKYTAFTIPSINNETPGIRYQYNVLPQGWKGSPAIFQSSMTKILEPFRKQNPDIIIYQYMDDLYVGSDLEIGQHRTKIEELRQHLLKWGFTTPDKKHQKEPPFLWMGYELHPDKWTVQPIVLPEKDSWTVNDIQKLVGKLNWASQIYAGIKVKQLCKLLRGTKALTEVIPLTKEAELELAENREILKEPVHGVYYDPSKDLIVEIQKQGQGQWTYQIFQEPFKNLKTGKYARTRGAHTNDVKQLTEAVQKIANESIVIWGKIPKFKLPIQKETWETWWTEYWQATWIPEWEFVNTPPLVKLWYQLEKEPIVGAETFYVDGAANRETKLGKAGYVTSRGRQKVVSLTDTTNQKTELQAIHLALQDSGLEVNIVTDSQYALGIIQAQPDKSESELVSQIIEQLIKKEKVYLAWVPAHKGIGGNEQVDKLVSAGIRKVLFLDGIDKAQEDHEKYHSNWRAMASDFNLPPIVAKEIVASCDKCQLKGEAMHGQVDCSPGIWQLDCTHLEGKIILVAVHVASGYIEAEVIPAETGQETAYFLLKLAGRWPVTTIHTDNGSNFTSTTVKAACWWAGIKQEFGIPYNPQSQGVVESMNKELKKIIGQVRDQAEHLKTAVQMAVFIHNFKRKGGIGGYSAGERIIDIIATDIQTKELQKQITKIQNFRVYYRDNRDPIWKGPAKLLWKGEGAVVIQDNSDIKVVPRRKVKIIRDYGKQMAGDDCVASRQDED

SEQ ID NO: 897 - protein, 1005 aa, Artificial
  HIV Pol
FFREDLAFLQGKAEFSSEQNRANSPTRRELQVWGRDNNSLSEAGEEAGDDRQGPVSFSFPQITLWQRPIVTIKIGGQLKEALLDTGADDTVLGEMNLPRRWKPKMIGGIGGFIKVRQYDQITIGICGHKAIGTVLVGPTPVNIIGRNLLTQLGCTLNFPISPIETVPVKLKPGMDGPKVKQWPLTEEKIKALIEICTEMEKEGKISKIGPENPYNTPVFAIKKKDSTKWRKLVDFRELNKKTQDFWEVQLGIPHPAGLKKKKSVTVLDVGDAYFSVPLDKDFRKYTAFTIPSINNETPGIRYQYNVLPQGWKGSPAIFQSSMTKILEPFRKQNPDIVIYQYMDDLYVGSDLEIGQHRAKIEELRRHLLRWGFTTPDKKHQKEPPFLWMGYELHPDKWTVQPIVLPEKDSWTVNDIQKLVGKLNWASQIYAGIKVKQLCKLLRGTKALTEVIPLTEEAELELAENREILKEPVHGVYYDPSKDLIAEVQKQGQGQWTYQIYQEPFKNLKTGKYARMRGAHTNDVKQLTEAVQKIATESIVIWGKTPKFRLPIQKETWETWWTEYTATWIPEWEVVNTPPLVKLWYQLEKEPIVGAETFYVDGAANRETKKGKAGYVTNRGRQKVVSLTDTTNQKTELQAIHLALQDSGLEVNIVTDSQYALGIIQAQPDKSESELVSQIIEQLIKKEKVYLAWVPAHKGIGGNEQVDKLVSAGIRKVLFLDGIDKAQEDHEKYHSNWRAMASDFNLPPIVAKEIVASCDKCQLKGEAMHGQVDCSPGIWQLDCTHLEGKVILVAVHVASGYIEAEVIPAETGQETAYFLLKLAGRWPVKTIHTDNGPNFTSTTVKAACWWTGIKQEFGIPYNPQSQGVIESMNKELKKIIGQVRDQAEHLKRAVQMAVFIHNFKRKGGIGGYSAGERIVGIIATDIQTKELQKQITKIQNFRVYYRDSRDPLWKGPAKLLWKGEGAVVIQDNNDIKVVPRRKAKVIRDYGKQTAGDDCVASRQDED

SEQ ID NO: 898 - protein, 1003 aa, Artificial
  HIV Pol
FFRENLAFPQGKAREFSSEQTRANSPTRRELQVWGGDNNSLSEAGADRQGTVSLSFPQITLWQRPLVTIKVGGQLKEALLDTGADDTVLEDMSLPGRWKPKMIGGIGGFIKVRQYEQIDIEICGHKAKGTVLVGPTPVNIIGRNLLTQIGCTLNFPISPIETVPVKLKPGMDGPKVKQWPLTEEKIKALVEICTEMEKEGKISKIGPENPYNTPVFAIKKKDSTKWRKLVDFRELNKRTQDFWEVQLGIPHPAGLKKKKSVTVLDVGDAYFSVPLDEDFRKYTAFTIPSINNETPGIRYQYNVLPQGWKGSPAIFQSSMTKILEPFRKQNPDIVIYQYMDDLYVGSDLEIGQHRAKIEDLRQHLLKWGFTTPDKKHQKEPPFLWMGYELHPDKWTVQPIVLPEKDSWTVNDIQKLVGKLNWASQIYAGIKVKQLCKLLRGTKALTEVVPLTEEAELELAENREILKEPVHGVYYDPTKDLIAELQKQGQGQWTYQIYQEPYKNLKTGKYARMRGAHTNDVKQLTEAVQKIATESIVIWGKTPKFKLPIQKETWEAWWTDYWQATWIPEWEFVNTPPLVKLWYQLEKEPIVGAETFYVDGAANRDTKSGKAGYVTDRGRQKVVSLADTTNQKTELQAIHLALQDSGLEVNIVTDSQYALGIIQAQPDKSESELVSQIIEQLIKKEKVYLAWVPAHKGIGGNEQVDKLVSAGIRKVLFLDGIDKAQEEHEKYHTNWRAMASDFNLPPVVAKEIVASCNKCQLKGEAMHGQVDCSPGIWQLDCTHLEGKVILVAVHVASGYIEAEVIPAETGQETAYFLLKLAGRWPVKTIHTDNGSNFTSTTVKAACWWAGIKQEFGIPYNPQSQGVVESMNKELKKIIGQVRDQAEHLKTAVQMAVFIHNFKRKGGIGGYSAGERIVDIIASDIQTKELQKQITKIQNFRVYYRDSRDPLWKGPAKLLWKGEGAVVIQDNSDIKVVPRRKAKIIRDYGKQMAGDDCVASRQDED

SEQ ID NO: 899 - protein, 1002 aa, Artificial
  HIV Pol
FFRENLAFPQGKARELSSEQTRANSPTRRELQVWGRDNSLSEAGEDRQGTVSFSFPQITLWQRPIVTVKIGGQLKEALLDTGADDTVLEEMNLPGKWKPKMIGGIGGFIKVRQYDQILIEICGHKAIGTVLVGPTPVNIIGRNLLTQIGCTLNFPISPIETVPVKLKPGMDGPKVKQWPLTEEKIKALVEICTEMEKEGKISKIGPENPYNTPVFAIKKKDSTKWRKLVDFRELNKRTQDFWEVQLGIPHPAGLKKKKSVTVLDVGDAYFSVPLDKEFRKYTAFTIPSINNETPRIRYQYNVLPQGWKGSPAIFQSSMTKILEPFKKQNPEIVIYQYMDDLYVGSDLEIGQHRIKIEELREHLLKWGFTTPDKKHQKEPPFLWMGYELHPDKWTVQPIVLPEKDSWTVNDIQKLVGKLNWASQIYAGIKVKQLCKLLRGTKALTEVVQLTKEAELELAENREILKEPVHGVYYDPSKDLIAEIQKQGQGQWTYQIYQEPFKNLKTGKYARMRGAHTNDVKQLTEAVQKVATESIVIWGKTPKFKLPIQKETWEAWWTEYWQATWIPEWEFVNTPPLVKLWYQLEKEPIIGAETFYVDGAANRETKLGKAGYVTDRGRQKVVSLTDTTNQKTELQAIHLALQDSGLEVNIVTDSQYALGIIQAQPDKSESELVSQIIEQLIKKEKVYLAWVPAHKGIGGNEQVDRLVSTGIRKVLFLDGIDKAQDEHEKYHSNWRAMASDFNLPPVVAKEIVASCDKCQLKGEAMHGQVDCSPGIWQLDCTHLEGKIILVAVHVASGYIEAEVIPAETGQETAYFILKLAGRWPVKVIHTDNGSNFTSTTVKAACWWAGIKQEFGIPYNPQSQGVVESMNKQLKQIIGQVRDQAEHLKTAVQMAVFIHNFKRKGGIGGYSAGERIVDIIATDIQTKELQKQITKIQNFRVYYRDSRDPLWKGHAKLLWKGEGAVVIQDNSDIKVVPRRKAKIIRDYGKQMAGDDCVASRQDED

SEQ ID NO: 900 - protein, 1003 aa, Artificial
  HIV Pol
FFREDLAFLQGKAREFSSEQTRANSPTRRELQVWGGENNSLSEAGADRQGTVSFNFPQITLWQRPLVTIRIGGQLKEALLDTGADDTVLEEMNLPGKWKPKMIGGIGGFIKVRQYDQIPVEICGHKAIGTVLVGPTPVNIIGRNLLTQIGCTLNFPISPIETVPVKLKPGMDGPKVKQWPLTEEKIKALVEICTEMEKEGKISKIGPENPYNTPVFAIKKKDSTKWRKLVDFRELNKRTQDFWEVQLGIPHPAGLKKKKSVTVLDVGDAYFSVPLDKDFRKYTAFTIPSINNETPGIRYQYNVLPQGWKGSPAIFQSSMTKILEPFRKQNPDIVIYQYMDDLYVGSDLEIGQHRTKIEELRQHLLRWGFTTPDKKHQKEPPFLWMGYELHPDKWTVQPIMLPEKDSWTVNDIQKLVGKLNWASQIYAGIKVKQLCKLLRGTKALTEVIPLTEEAELELAENREILKEPVHEVYYDPSKDLVAEIQKQGQGQWTYQIYQEPFKNLKTGKYARMRGAHTNDVKQLTEAVQKVSTESIVIWGKIPKFKLPIQKETWEAWWMEYWQATWIPEWEFVNTPPLVKLWYQLEKEPIVGAETFYVDGAANRETKLGKAGYVTDRGRQKVVSIADTTNQKTELQAIHLALQDSGLEVNIVTDSQYALGIIQAQPDKSESELVSQIIEQLIKKEKVYLAWVPAHKGIGGNEQVDKLVSAGIRKVLFLNGIDKAQEEHEKYHSNWRAMASDFNLPPVVAKEIVASCDKCQLKGEAMHGQVDCSPGIWQLDCTHLEGKIILVAVHVASGYIEAEVIPAETGQETAYFLLKLAGRWPVKTIHTDNGSNFTSTTVKAACWWAGIKQEFGIPYNPQSQGVVESMNNELKKIIGQVRDQAEHLKTAVQMAVFIHNFKRKGGIGGYSAGERIVDIIATDIQTKELQKQITKIQNFRVYYRDNKDPLWKGPAKLLWKGEGAVVIQDNSDIKVVPRRKAKIIRDYGKQMAGDDCVASRQDED

SEQ ID NO: 901 - protein, 1003 aa, Artificial
  HIV Pol
FFREDLVFPKGKAREFSSEQTRTNSPTRRELQVQGRDNNSLSEAGANRQGAVSFNFPQITLWQRPLVTIKIEGQLKEALLDTGADDTVLEDMNLPGKWKPKMIGGIGGFIKVRQYDQVPIEICGHKAIGTVLVGPTPVNIIGRNLLTQIGCTLNFPISPIETVPVKLKPGMDGPKVKQWPLTEEKIKALVEICTEMEKEGKISKIGPENPYNTPVFAIKKKDSTKWRKLVDFRELNKRTQDFWEVQLGIPHPSGLKKKKSVTVLDVGDAYFSVPLDEDFRKYTAFTIPSINNETPGIRYQYNVLPQGWKGSPAIFQSSMTKILEPFRKQNPDIVIYQYMDDLYVGSDLEIGQHRTKIEELRQHLLRWGFTTPDKKHQKDPPFLWMGYELHPDKWTVQPIKLPEKESWTVNDIQKLVGKLNWASQIYAGIKVKQLCKLLRGTKALTEIIPITEEAELELAENREILKEPVHGVYYDPSKDLIAELQKQGQGQWTYQIYQEPFKNLKTGKYARVRGAHTNDVKQLTEAVQKITTESIVIWGKTPKFKLPIQKETWETWWTEYWQATWIPEWEFVNTPPLVKLWYQLEKEPIVGAETFYVDGAANKETKLGKAGYVTNRGRQRVVSLTDTTNQKTELQAIHLALQDSGLEVNIVTDSQYALGIIQAQPDQSESELVSQIIEQLIKKEKVYLAWVPAHKGIGGNEQVDKLVSSGIRKVLFLDGIDKAQEEHEKYHSNWRAMASDFNLPPVVAKEIVASCDKCQLKGEAMHGQVDCSPGIWQLDCTHLEGKIILVAVHVASGYIEAEVIPAETGQETAYFILKLAGRWPVKTIHTDNGSNFTSTTVKAACWWAGIKQEFGIPYNPQSQGVIESMNKELKKIIGQVRDQAEHLKTAVQMAVFIHNFKRKGGIGGYSAGERIIDIIATDIQTQQLQKQITKIQNFRVYYRDSRDPLWKGPAKLLWKGEGAVVIQDNSDIKVVPRRKAKIIRDYGKQMAGDDCVASRQDED

SEQ ID NO: 902 - protein, 1003 aa, Artificial
  HIV Pol
  misc_feature (5)..(5): Xaa can be any naturally occurring amino acid
  misc_feature (11)..(11): Xaa can be any naturally occurring amino acid
  misc_feature (15)..(15): Xaa can be any naturally occurring amino acid
  misc_feature (35)..(35): Xaa can be any naturally occurring amino acid
  misc_feature (270)..(270): Xaa can be any naturally occurring amino acid
  misc_feature (274)..(274): Xaa can be any naturally occurring amino acid
  misc_feature (277)..(277): Xaa can be any naturally occurring amino acid
  misc_feature (279)..(279): Xaa can be any naturally occurring amino acid
  misc_feature (290)..(290): Xaa can be any naturally occurring amino acid
  misc_feature (422)..(422): Xaa can be any naturally occurring amino acid
  misc_feature (432)..(432): Xaa can be any naturally occurring amino acid
  misc_feature (469)..(469): Xaa can be any naturally occurring amino acid
  misc_feature (478)..(478): Xaa can be any naturally occurring amino acid
  misc_feature (489)..(489): Xaa can be any naturally occurring amino acid
  misc_feature (503)..(503): Xaa can be any naturally occurring amino acid
  misc_feature (505)..(505): Xaa can be any naturally occurring amino acid
  misc_feature (521)..(521): Xaa can be any naturally occurring amino acid
  misc_feature (524)..(524): Xaa can be any naturally occurring amino acid
  misc_feature (530)..(530): Xaa can be any naturally occurring amino acid
  misc_feature (533)..(533): Xaa can be any naturally occurring amino acid
  misc_feature (544)..(544): Xaa can be any naturally occurring amino acid
  misc_feature (571)..(571): Xaa can be any naturally occurring amino acid
  misc_feature (682)..(682): Xaa can be any naturally occurring amino acid
  misc_feature (684)..(685): Xaa can be any naturally occurring amino acid
  misc_feature (717)..(717): Xaa can be any naturally occurring amino acid
  misc_feature (722)..(722): Xaa can be any naturally occurring amino acid
  misc_feature (747)..(747): Xaa can be any naturally occurring amino acid
  misc_feature (777)..(777): Xaa can be any naturally occurring amino acid
  misc_feature (821)..(821): Xaa can be any naturally occurring amino acid
  misc_feature (826)..(826): Xaa can be any naturally occurring amino acid
  misc_feature (842)..(842): Xaa can be any naturally occurring amino acid
  misc_feature (845)..(845): Xaa can be any naturally occurring amino acid
  misc_feature (851)..(851): Xaa can be any naturally occurring amino acid
  misc_feature (869)..(869): Xaa can be any naturally occurring amino acid
  misc_feature (925)..(925): Xaa can be any naturally occurring amino acid
  misc_feature (927)..(927): Xaa can be any naturally occurring amino acid
  misc_feature (930)..(930): Xaa can be any naturally occurring amino acid
  misc_feature (932)..(932): Xaa can be any naturally occurring amino acid
  misc_feature (935)..(935): Xaa can be any naturally occurring amino acid
  misc_feature (938)..(938): Xaa can be any naturally occurring amino acid
FFREXPAFPHXKARXFPSEQTRAISPTSRELQVWXRDNNSLSEAGTDRQGTVSFSFPQITLCQRPLVAIKIGGQIKEALLDTGADDTVLEEMSLPGRWKPKMVGGIGGFIKVRQYDQIPIEICGHKAIGTVLVGPTPVNIIGRNLLTQIGCTLNFPISPIETVPVKLKPGMDGPKVKQWPLTEEKIKALVEICTEMEKEGKVTKIGPENPYNTPVFAIKKKDSTKWRKLVDFRELNKRTQDFWEVQLGIPHPAGLKKKKSVTVLDVGDAXFSVXLDXEXRKYTAFTIPSXHNETPGIRYQYNVLPQGWKGSPTIFPSSMTQILEPFRKPNPEIVIYQYMDDLYVGSNLEIGQHRTKIEELRQHLLRWGFTTPDKKHQKEPPFLWMGYELHPDKWTVQPIELPEKDSWTVNDIQKLVGKLNWXSQIYAGIKVXQLCKLLRGTKALTEVVPLTEEAELELAGNREILKEPXHGVYYDPSXDLVAELQKQGXGQWTYQIYQEPFIXLXTGKYARTRGAHTNDVXQLXEAVQKXATXSIVIWGKTPKXILPIQKETWESRWTEYWQATWIPEWEXVNTPPLVKLWYQLEKEPIVGAETFYVDGAASRETKLGKAGYVTDRGRQKVVSLNDTTNQKTELQAIHLALQDSGLEVNIVTDSQYALGIIQAQPDKSESELVSQIIEQLIXKXXVYLAWVPAHKGIGGNEQVDKLVSSGIRKVLFXDGIDXAQEDHEKYHSNWRAMAGEFNLPPVXAKEIVACCDKCQLKGEAMHGQVDCSPGIWXLDCTHLEGKIILVAVHVASGYIEAEVIPAETGQETAYFILKLAXRWPVXTIHTDNGSNFISTTVXAAXWWAGIXQEFGIPYNPQSQGVVESXNKELKKIIGQVRDQAEHLKTAVQMAVFIHNFKRKGGIGGYSAGERIIDIIATDIQXKXLQXQXTIXQNXRVYYRDSRDPLWKGPAKLLWKGEGAVVIQDNSDIKVVPRRKAKIIRDYGKQMAGDDCVASRQDED

SEQ ID NO: 903 - protein, 1003 aa, Artificial
  HIV Pol
FFREDLAFPQGKARKFSSEQTRANSPIRRERQVWRRDNNSLSEAGADRQGTVSFSFPQITLWQRPLVTIKIGGQLKEALLDTGADDTVLEEMNLPGRWKPKMIGGIGGFIKVRQYDQIPIEICGHKAIGTVLVGPTPVNIIGRNLLTQIGCTLNFPISPIETVPVKLKPGMDGPKVKQWPLTEEKIKALVEICTEMEKEGKISKIGPENPYNTPVFAIKKKDSTKWRKLVDFRELNKRTQDFWEVQLGIPHPAGLKKKKSVTVLDVGDAYFSVPLHEDFRKYTAFTIPSINNETPGTRYQYNVLPQGWKGSPAIFQSSMTTILEPFRKQNPDLVIYQYMDDLYVGSDLEIGQHRTKIEELRQHLLRWGFTTPDKKHQKEPPFLWMGYELHPDKWTVQPIVLPEKDSWTVNDIQKLVGKLNWASQIYAGIKVRQLCKLLRGTKALTEVIPLTEEAELELAENREILKEPVHGVYYDPSKDLIAEIQKQGQGQWTYQIYQEPFKNLKTGKYARTRGAHTNDVKQLTEAVQKIATESIVIWGKTPKFKLPIQKETWETWWTEYWQATWIPEWEFVNTPPLVKLWYQLEKEPIIGAETFYVDGAANRETKLGKAGYVTNKGRQKVVSLTDTTNQKTELQAIYLALQDSGLEVNIVTDSQYALGIIQAQPDRSESELVSQIIEQLIKKEKVYLAWVPAHKGIGGNEQVDKLVSAGIRKVLFLDGIDKAQEEHEKYHSNWRAMASDFNLPPVVAKEIVASCDKCQLKGEAMHGQVDCSPGIWQLDCTHLEGKVILVAVHVASGYIEAEVIPAETGQETAYFLLKLAGRWPVTTIHTDNGSNFTSATVKAACWWAGIKQEFGIPYNPQSQGVVESMNKELKKIIGQVRDQAEHLKTAVQMAVFIHNFKRKGGIGGYSAGERIVDIIATDIQTKELQKQITKIQNFRVYYRDSRDPLWKGPAKLLWKGEGAVVIQDNSDIKVVPRRKAKIIRDYGKQMAGDDCVAGRQDED

SEQ ID NO: 904 - protein, 1003 aa, Artificial
  HIV Pol
FFRENLAFPQGKAREFPSEQTRANSPTSRELQVWGRGNNSLSETGADRQGDVSFGFPQITLWQRPLVTVKIGGQLKEALLDTGADDTVLEEINLPGRWKPKMIGGIGGFIKVRQYDQIPIEICGRKATGTVLVGPTPVNIIGRNLLTQIGCTLNFPISPIETVPVKLKPGMDGPRVKQWPLTEEKIKALTEICTEMEKEGKISKIGPENPYNTPVFAIKKKDSTKWRKLVDFRELNKRTQDFWEVQLGIPHPAGLKKKKSVTVLDVGDAYFSVPLDKDFRKYTAFTIPSTNNETPGLRYQYNVLPQGWKGSPAIFQSSMTKILEPFRKQNPDIVIYQYMDDLYVGSDLEIGQHRTKIEELRQHLLRWGFTTPDKKHQKEPPFLWMGYELHPDKWTVQPIVLPEKDSWTVNDIQKLVGKLNWASQIYAGIKVRQLCKLLRGTKALTEVVPLTAEAELELAENREILKEPVHGVYYDPSKDLIAEIQKQGQGQWTYQIYQEPYKNLKTGKYARMRGAHTNDVKQLTEAVQKITTESIVIWGKIPKFKLPIQKETWEAWWIEYWQATWIPEWEFVNTPPLVKLWYQLEKEPIVGAETFYVDGAANRETKLGKAGYVTDRGRQKVVPLTDTTNQKTELQAIHLALQDSGLEVNIVTDSQYALGIIQAQPDKSELEIVNQIIEQLIKKEKIYLAWVPAHKGIGGNEQVDKLVSSGIRKVLFLDGIDKAQEEHEKYHNNWRAMASDFNIPPVVAKEIVASCDKCQLKGEAMHGQVDCSPGIWQLDCTHLEGKVILVAVHVAGGYIEAEVIPAETGQETAYFLLKLAGRWPVKTIHTDNGSNFTSTTVKAACWWAGIKQEFGIPYNPQSQGVIESMNKELKKIIGQVRDQAEHLKTAVQTAVFIHNFKRKGGIGGYSAGERIVDIIATDIQTKELQKQITKIQNFRVYYRDSRDPLWKGPAKLLWKGEGAVVIQDNSDIKVVPRRKVKIIRDYGKQMAGGDCVAGRQDED

SEQ ID NO: 905 - protein, 999 aa, Artificial
  HIV Pol
FFRENLAFPQGEARKSSSEQNRANSPTRRELQVWGRDNNSLSEAGDDRQGTALNFPQITLWQRPLVNIKVGGQLKEALLDTGADDTVLEEIKLPGNWKPKMIGGIGGFIKVRQYDQILIEICGKKAIGTVLVGPTPVNIIGRNMLTQLGCTLNFPISPIETVPVKLKPGMDGPKVKQWLLTEEKIKALTAICDEMEREGKITKIGPENPYNTPVFAIKKKDSTKWRKLVDFRELNKRTDFWEVQLGIPHPAGLKKKKSVTVLDVGDAYFSVPLDEGFRKYTAFTIPSINNETPGIRYQYNVLPQGWKGSPSIFQSSTTKILEPFRAQNPEIIIYQYMDDLYVGSDLEIGQHRAKIEELREHLLKWGFTTPDKKHQKEPPFLWMGYELHPDKWTVQPIQLPEKDSWTVNDIQKLVGKLNWASQIYPGIKVRQLCKLLRGAKALTDIVPLTEEAELELAENREILKEPVHGVYYDPSKDLIAEIQKQGQNQWTYQIYQEPFKNLKTGKYAKMRTAHTNDVRQLTEAVQKIALESIIIWGKTPKFRLPIQKETWEAWWTDYWQATIPEWEFVNTPPLVKLWYQLEKEPIAGAETFYVDGAANREIKMGKAGYVTDRGRQKIVSITETTNQKTELQAIQLALQDSGSEVNIVTDSQYALGIIQAQPDKSESELVNQIIEQLIKKERVYLSWVPAHKGIGGNEQVDKLVSSGIRKVLFLDGINKAQEEHEKYHSNWRAMASEFNLPPIVAKEIVASCDKCQLKGEATHGQVDCSPGIWQLDCTHLEGKIILVAVHVASGYIEAEVIPAETGQETAYFILKLAGRWPVKVIHTDNGSNFISNTVKAACWWAGIQQEFGIPYNPQSQGVVESMNKELKKIIGQVRDQAEHLKTAVQMAVFIHNFKRGGIGGYSAGERIIDIIATDIQTKELQKQIMKIQNFRVYYRDSRDPIWKGPAKLLWKGEGAVVLQDNSDIKVVPRRKVKIIKDYGKQMAGADCMASRQDED

SEQ ID NO: 906 - protein, 999 aa, Artificial
  HIV Pol
FFRENLAFPQGEAREFPSEQTRANSPTSRELQVRGDNPRSETRAEGQGTLNFPQITLWQRPLVSIKVGGQIREALLDTGADDTVLEDINLPGKWKPKMIGGIGGFIKVRQYEQILIEICGKKAIGTVLVGPTPVNIIGRNMLTQLGCTLNFPISPIETVPVKLKPGMDGPKVKQWPLTEEKIKALTAICEEMEKEGKITKIGPENPYNTPVFAIKKKDSTKWRKLVDFRELNKRTQDFWEVQLGIPHPAGLKKKKSVTVLDVGDAYFSVPLDESFRKYTAFTIPSINNSTPGIRYQYNVLPQGWKGSPAIFQSSMIKILEPFRTKNPDIVIYQYMDDLYVGSDLEIGQHRAKIEELREHLLKWGLTTPYKKHQKEPPFLWMGYELHPDKWTVQPIQLPDKDSWTVHDIQKLVGKLNWASQIYPGIRVKHLCKLLRGAKALTDIVPLTEEAELELAENREILKEPVHGVYYDPSKDLIAEVQKQGHDQWTYQIYQEPFKNLKTGKYAKMRTAHTNDVKQLTEVVQKITMESIVIWGKTPKFRLPIQKDTWETWWTDYWQATWIPEWEFVNTPPLVKLWYQLEKEPIAGAETFYVDGAANRETKLGKAGYVTDKGRQKIVPLTETTNQRAELQAIQLALQDSGSEVNIVTDSQYALGIIQAQPDKSESELVTQIIEQLIKKERVYLSWVPAHKGIGGNEQVDKLVSSGIRKVLFLDGIDKAQEEHEKYHCNWRAMASEFNLPPIVAKEIVASCDKCQLKGEAIHGQVDCSPGIWQLDCTHLEGKIILVAVHVASGYIEAEVIPAETGQETAYYILKLAGRWPVKVIHTDNGSNFTSTAVKAACWWAGIQQEFGIPYNPQSQGVVESMNKELKKIIGQVREQAEHLKTAVQMAVFIHNFKRKGGIGGYSAGERIIDIIATDIQTKELQKQIIKIQNFRVYYRDSRDPVWKGPAKLLWKGEGAVVIQDNSDIKVVPRRKVKIIRDYGKQMAGADCVAGRQDED

SEQ ID NO: 907 - protein, 997 aa, Artificial
  HIV Pol
FFRENLAFPQGEAREFPSEQTGANSPTSRKLRGNNPCSEAGDERQGTLNFPQITLWQRPLVSIKVGGQIKEALLDTGADDTVLEEINLPGKWRPKMIGGIGGFIKVRQYDQIPIEICGKKAIGTVLVGPTPVNIIGRNLLTQLGCTLNFPISPIETVPVKLKPGMDGPKVKQWPLTEEKIKALTAICEEMEKEGKITKIGPENPYNTPVFAIKKKDSTKWRKLVDFRELNKRTQDFWEVQLGIPHPAGLKKKKSVTVLDVGDAYFSVPLDESFRKYTAFTIPSINNETPGIRYQYNVLPQGWKGSPSIFQSSMTKILEPFRAKNPELVIYQYMDDLYVGSDLEIGQHRARIEELRKHLLRWGFTTPDKKHQKEPPFLWMGYELHPDKWTVQSIKLPEKESWTVNDIQKLVGKLNWASQIYPGVKVRQLCKLLRGAKALTDIVPPTEEAELELAENREILKEPVHGVYYDPSKDLIAEIQKQGGDQWTYQIYQEPFKNLKTGKYAKMRTAHTNDVKQLTEAVQKISMESIVIWGKIPKFRLPIQKEAWEAWWTDYWQATWIPEWEFVNTPPLVKLWYQLETEPMAGAETFYVDGAANRETKIGKAGYVTDKGRQEVVTLTETTNQKAELQAIQLALQDSGPEVNIVTDSQYALGIIQAQPDKSESELVNQIIEQLIKKEKVYLSWVPAHKGIGGNEKVDKLVSSGIREVLFLDGIDKAQEEHEKYHSNWRAMASEFNLPPIVAKEIVASCDKCQLKGEAIHGQVDCSPGIWQLDCTHLEGKVILVAVHVASGYIEAEVIPAETGQETAYYILKLAGRWPVKIIHTDNGSNFTSAAVKAACWWAGIQQEFGIPYNPQSQGVVESMNKELKKIIGQVRDQAEHLKTAVQMAVFIHNFKRKGGIGGYSAGERIIDMIATDIQTKELQKQIIKIQNFRVYYRDSRDPIWKGPAKLLWKGEGAVVIQDNSDIKVVPRRKVKIIRDYGKQMAGADCVAGRQDED

SEQ ID NO: 908 - protein, 1000 aa, Artificial; identical to SEQ ID NO: 836
  HIV Pol

SEQ ID NO: 909 - protein, 1000 aa, Artificial; identical to SEQ ID NO: 837
  HIV Pol

SEQ ID NO: 910 - protein, 1010 aa, Artificial
  HIV Pol
FFRETLAFQQGKAREFPSEQTRANSPTRESQTRANSPTTRELQVRGSNTFSEAGAERQGSLNFPQITLWQRPLVTIKIGGQLKEALLDTGADDTVLEEINLPGKWKPKMIGGIGGFIKVRQYDQIIIEICGKKAIGTVLVGPTPVNIIGRNMLTQLGRTLNFPISPIETVPVKLKPGMDGPKVKQWPLTEEKIKALTAICEEMEQEGKISRIGPENPYNTPVFAIKKKDSTKWRKLVDFRELNKRTQDFWEVQLGIPHPAGLKKKKSVTVLDVGDAYFSVPLDEGFRKYTAFTIPSTNNETPGIRYQYNVLPQGWKGSPPIFQSSMPQILEPFRAPNPEIVIYQYMDDLYVGSDLEIGQHRAPIEELREHLLKWGFTTPDKKHQKEPPFLWMGYELHPDKWTVQPIQLPEKDSWTVNDIQKLVGKLNWASQIYPGIKVRQLCKLLRGAKALTDIVTLTEEAELELAENREILKEPVHGVFYDPSKDLIAEIQKQGNDQWTFQFYQEPFKNLKTGKFAKRGTAHTNDVKQLTAVVQKIALESIVIWGKTPKFRLPIQKETWEAWWTDYWQATWIPEWEFVNTPPLVKLWYQLEKEPIAGVETFYVDGAANRETKIGKAGYVTDRGRQKIVSLTETTNQKTELQAIQLALQDSGSEVNIVTDSQYALGIILAQPDKSESEIVNQIIEQLISKERVYLSWVPAHKGIGGNEQVDKLVSSGIRKVLFLDGIDKAQEEHEKYHSNWRAMANEFNIPPVVPKEIVACCDKCQLKGEAIHGQVNCSPGIWQLDCTHLEGKIILVAVHVASGYIEAEVIPAETGQETAYFLLKLAGRWPVRVIHTDNGSNFTSNAVKAACWWAGIQQEFGIPYNPQSQGVVESMNKELKKIIGQVREQAEHLKTAVQMAVFIHNFKRRGGIGGYSAGERIIDIIASDIQTKELQNQILKIQNFRVYYRDSRDPIWKGPAKLLWKGEGAVVIQDNSDIKVVPRRKAKIIRDYGKQMAGADCVAGRQDED

SEQ ID NO: 911 - protein, 999 aa, Artificial
  HIV Pol
FFRENLAFPQGEAREFPPEQTGANSPTSRELQVRGDNPSSKAGAERQGTLNFPQITLWQRPLVSIRVGGQIKEALLDTGADDTVLEEVNLPGKWKPKMIGGIGGFIKVRQYDQIPIEICGKKAIGTVLVGPTPINIIGRNMLTQLGCTLNFPISPIETVPVKLKPGMDGPKVKQWPLTEEKIKALTAICDEMEKEGKITKIGPENPYNTPIFAIKKKDSIKWRKLVDFRELNKRTQDFWEVQLGIPHPAGLKKKKSVTVLDVGDAYFSVPLYEDFRKYTAFTIPSINNETPGIRYQYNVLPQGWKGSPAIFQSSMIRILEPFRAQNPEIVIYQYMDDLYVGSDLEIGQHRAKIEELREHLLKWGFTTPDKKHQKEPPFLWMGYELHPDKWTVQPIQLPEKDSWTVNDIQKLVGKLNWASQIYPGIKVRQLCKLLRGAKALTDIVPLTEEAELELAENREILKEPVHGVYYDPSKDLIAEIQKQGQDQWTYQIYQEPFKNLKTGKYAKRRTAHTNDVKQLTEAVQKIAMESIVIWGKTPKFRLPIQKETWETWWTDYWQATWIPEWEFVNTPPLVKLWYQLEKDPIAGVETFYVDGAANRETKLGKAGYVTDRGRQKIVSLTETTNQKTELQAIYLALQDSGSEVNIVTDSQYALGIIQAQPDKSESELVNQIIEQLIKKERVYLSWVPAHKGIGGNEQVDKLVSSGIRKVLFLDGIDKAQEEHEKYHSNWRAMASDFNLPPVVAKEIVASCDQCQLKGEAMHGQVDCSPGIWQLDCTHLEGKIILVAVHVASGYIEAEVIPAETGQETAYFILKLAGRWPVKVIHTDNGSNFTSAAVKAACWWAGIQQEFGIPYNPQSQGVVESMNKELKKIIGQVRDQAEHLKTAVQMAVFIHNFKRKGGIGGYSAGERIIDIIATDIQTKELQKQIIKIQNFRVYYRDSRDPIWKGPAKLLWKGEGAVVIQDNSDIKVVPRRKAKIIKDYGKQMAGADCVAGRQDED

SEQ ID NO: 912 - protein, 999 aa, Artificial
  HIV Pol
FFRENLAFPQGEAREFPPEQTRADSPTSRELQVRGDTPSSKAGAERQGTLNFPQITLWQRPLVSIRVGGQIKETLLDTGADDTVLEEVNLPGKWKPKMIGGIGGFIKVRQYDQIPIEICGKKAIGTVLVGPTPVNIIGRNMLTQLGCTLNFPISPIETVPVKLKPGMDGPKVKQWPLTKEKIEALTAICDEMEKEGKITKIGPENPYNTPIFAIKKKDSTKWRKLVDFRELNKRTQDFWEIQLGIPHPAGLKKKKSVTVLDVGDAYFSVPLYEDFRKYTAFTIPSINNETPGIRYQYNVLPQGWKGSPAIFQSSMTRILEPFRARNPEIVIYQYMDDLYVGSDLEIGQHRAKIEELRGHLLKWGFTTPDKKHQKEPPFLWMGYELHPDKWTVQPIQLPEKDSWTVNDIQKLVGKLNWASQIYPGIKVRQLCKLLRGAKALTDIVPLTEEAELELAENREILKEPVHGVYYDPSKDLIAEIQKQGQDQWTYQVYQEPFKNLKTGKYAKMRTAHTNDVKQLTEAVQKIAMESIVIWGKTPKFRLPIQKETWETWWTDYWQATWIPEWEFVNTPPLVKLWYQLEKDPIAGVETFYVDGAANRETKKGKAGYVTDRGRQKIVSLTETTNQKTELQAICLALQDSGSEVNIVTDSQYALGIIQAQPDKSESELVNQIIEQLIKKERVYLSWVPAHKGIGGNEQVDKLVSSGIRKVLFLDGIDKAQEEHEKYHSNWRAMASDFNLPPVVAKEIVASCDQCQLKGEAMHGQVDCSPGIWQLDCTHLEGKIILVAVHVASGYIEAEVIPAETGQETAYFILKLAGRWPVKVIHTDNGSNFTSAAVKAACWWASIQQEFGIPYNPQSQGVVEAMNKELKKIIGQVRDQAEHLKTAVQMAVFIHNFKRKGGIGGYSAGERIIDIIATDIQTKELQKQITKIQNFRVYYRDSRDPIWKGPAKLLWKGEGAVVLQDNSDIKVVPRRKAKIIKDYGKQMAGADCVAGRQDED

SEQ ID NO: 913 - protein, 1008 aa, Artificial
  HIV Pol
FFRENLAFPQGEAREFPSEQTRANSPSSQTRANSPSSRELQVRGDNPRSEAGAKRQGTLNFPQITLWQRPLVSIKVGGQIREALLDTGADDTVLEEVNLPGKWKPKMIGGIGGFIKVRQYDQIPIEICGKKAIGTVLVGPTPVNIIGRNLLTQLGCTLNFPISPIETVPVKLKPGMDGPKVKQWPLTEEKIKALTAICDEMEREGKITKIGPENPYNTPIFAIKKKDSTKWRKLVDFRELNKRTQDFWEVQLGIPHPAGLKKKKSVTVLDVGDAYFSVPLYEDFRKYTAFTIPSRNNETPGIRYQYNVLPQGWKGSPAIFQASMTKILEPFRAQNPEIVIYQYMDDLYVGSDLEIGQHRAKIEELRQHLLRWGFTTPDKKHQKEPPFLWMGYELHPDKWTVQPIQLPEKDSWTVNDIQKLVGKLNWASQIYPGIKVKQLCRLLRGAKVLTDIVPLTEEAELELAENREILKEPVHGVYYDPSKDLIAEIQKQGQGQWTYQIYQEPFKNLKTGKYAKMRTAHTNDVKQLAEAVQKIAMESIVIWGKTPKFRLPIQKETWEAWWTDYWQATWIPEWEFVNTPPLVKLWYRLEKEPIAGVETFYVDGAANRETKIGKAGYVTDRGRQKIVPLTETTNQKTELQAIYLALQDSGSEVNIVTDSQYALGIIQAQPDKSESELVNQIIEQLIKKERVYLSWVPAHKGIGGNEQVDKLVSSGIRKVLFLDGIDKAQEEHEKYHSNWRAMASDFNLPPIVAKEIVASCGQCQQKGEAMHGQVDCSPGIWQLDCTHLEGKIILVAVHVASGYIEAEVIPAETGQETAYYILKLAGRWPVKVIHTDNGSNFTSAAVKAACWWAGIQQEFGIPYNPQSQGVVESMNKELKKIIGQVRDQAEHLKTAVQVAVFIHNFKRRGGIGGYSAGERIIDIIATDIQTKELQKQIIKIHNFRVYYRDSRDPIWKGPAKLLWKGEGAVVIQDNSDIKVVPRRKAKIIRDYGKQMAGADCVAGRQDED

SEQ ID NO: 914 - protein, 999 aa, Artificial
  HIV Pol
FFRENLAFPQGEAREFPPEQTRANSPTSRELQVRGDTPSSKAGAEREGTLNFPQITLWQRPLVSIRVGGQTREALLDTGADDTVLEEVNLPGKWKPKMIGGIGGFIKVRQYDQIPIEICGKKAIGTVLVGPTPVNIIGRNMLTQLGCTLNFPISPIETVPVKLKPGMDGPKVKQWPLTKEKIEALTIICNEMEKEGKITKIGPENPYNTPIFAIKKKDSTKWRKLVDFRELNKRTQDFWEVQLGIPHPAGLKKKKSVTVLDVGDAYFSVPLYEDFRKYTAFTIPSINNETPGIRYQYNVLPQGWKGSPAIFQSSMTKILEPFRGRNPEIDIYQYMDDLYVGSDLEIGQHRAKIEELREHLLKWGFTTPDKKHQKEPPFLWMGYELHPDKWTVQPIQLPEKDSWTVNDIQKLVGKLNWASQIYPGIKVRQLCKLLRGAKALTDIVPLTEEAELELAENREILKEPIHGVYYDPSKDLIAEIQKQGQDQWTYQVYQEPFKNLKTGKYAKMRTAHTNDVKQLTEAVQKIAMESIVIWGKTPKFRLPIQKETWETWWTDYWQATWIPEWEFVNTPPLVKLWYQLEKDPIAGAETFYVDGAANRDTKIGKAGYVTDRGRQKIVSLTETTNQKTELQAICLALQDSGSEVNIVTDSQYALGIIQAQPDKSESELVNQIIEQLINKERVYLSWVPAHKGIGGNEQVDKLVSSGIRRVLFLDGIDKAQEEHEKYHSNWRAMASDFNLPPVVAKEIVASCDQCQLKGEAMHGQVDCSPGIWQLDCTHLEGKIILVAVHVASGYMEAEVIPAETGQETAYFILKLAGRWPVKVIHTDNGSNFTSAAVKAACWWAGIQQEFGIPYNPQSQGVVEAMNKELKKIIGQVRDQAEHLKTAVQMAVFIHNFKRKGGIGGYSAGERIIDIISTDIQTRELQKQIIKIQNFRVYYRDSRDPIWKGPAKLLWKGEGAVVIQDNSDIKVVPRRKAKIIKDYGKQMAGADCVAGRQDED

SEQ ID NO: 915 - protein, 998 aa, Artificial
  HIV Pol
FFRENLAFPQGEAREFPPETRANSSTSRELQVRGDNPSSEAGAERQGTFNFPQITLWQRPLVSIRVGGQIKEALLDTGADDTVLEEVSLPGKWRPKMIGGIGGFIKVRQYEEIPIEICGKKAIGTVLVGPTPVNIIGRNMLTQLGCTLNFPISPIETVPVKLKPGMDGPKVKQWPLTEEKIKALTAICDEMEKEGKITKIGPENPYNTPIFAIKKKDSTKWRKLVDFRELNKRTQDFWEVQLGIPHPAGLKKKKSVTVLDVGDAYFSVPLYEDFRKYTAFTIPSINNETPGIRYQYNVLPQGWKGSPAIFQNSMTRILEPFRAQNPEIVIYQYMDDLYVGSDLEIGQHRAKIEELRKHLLRWGFTTPDKKHQKEPPFLWMGYELHPDKWTVQPIQLPEKDSWTVNDIQKLVGKLNWASQIYPGIKVRQLCKLLRGTKALTDIVPLTEEAELELAENREILKEPVHGVYYDPSKDLIAEIQKQGQDQWTYQIYQEPFKNLKTGKYAKMRTAHTNDVKQLTEAVQKIATESIVIWGKTPKFRLPIQKETWETWWTDYWQATWIPEWEFVNTPPLVKLWYQLEKEPIAGAETFYVDGAANRETKIGKAGYVTDKGRNKIVSLTETTNQKTELQAICLALQDSGSEVNIVTDSQYALGIIQAQPNKSESELVNQIIEQLIKKERVYLSWVPAHKGIGGNEQVDKLVSSGIRKVLFLDGIDKAQEEHERYHSNWRAMASDFNLPPVVAKEIVASCDQCQLKGEATHGQVDCSPGIWQLDCTHLEGKIILVAVHVASGYMEAEVIPAETGQETAYFILKLAGRWPVKVIHTDNGSNFTSAAVKAACWWAGIQQEFGIPYNPQSQGVVESMNKELKKIIGQVRDQAEHLKTAVQMAVFIHNFKRKGGIGGYSAGERIIDIIATDIQTKELQKQITKVQNFRVYYRDSRDPIWKGPAKLLWKGEGAVVIQDNSDIKVVPRRKAKIIKDYGKQMAGADCVAGRQDED

SEQ ID NO: 916 - protein, 1000 aa, Artificial
  HIV Pol
  misc_feature (925)..(925): Xaa can be any naturally occurring amino acid
FFRENLASQQGEAREFSSEQTRANSPTSRELGDGGRDNLLPEAGAERQGTPFSFSFPQITFWQRPLVTVKIEGQLKEALLDTGADDTVLEDINLPGRWKPKMIGGIGGFIKVRQYDQILIEICGKRAIGTVLVGPTPVNIIGRNMLTQIGCTLNFPISPIDTVPVTLKPGMDGPKVKQWPTEEKIALTEICKEMEEEGKISKIGPENPYNTPVFAIKEKDSTKWRKLVDFRELNKRTQDFWEVQLGVPHPAGLKKKKSVTVLDVGDAYFSVPLYEGFRKYTAFTIPSINNETPGIRYQYNVLPQGWKGSPAIFQSSMTKILEPYRAKNPEIVIYQYMDDLYVGSDLEIGQHRTKIEELRDHLLKWGFTTPDKKHQKEPPFLWMGYELHPDRWTVQPIELPEKDSWTVNDIQKLVGKLNWASQIYAGIKVKQLCKLLRGAKALTEVVPLTEEAELELAENREILKNPVHGVYYDPSKELVAEIQKQGQDQWTYQIYQEPFKNLKTGKYARKRSAHTNDVRQLAEVVQKVATESIVIWGKTPKFRLPIQRETWETWWAEYWQATWIPEWEFVNTPPLVKLWYQLEKDPIAGAETLYVDGAASRENKLGKAGYVTDRGRQKVVSLTETTNQKTELHAIHLALQDSGSDVNIVTDSQHALGIIQAQPDRSESEIVNQIIEKLIEKERVYLSWVPAHKGIGGNEQVDKLVSSGIRKVLFLDGIDKAQEEHERYHSNWRTMASDFNLPPIVAKEIVANCDKCQLKGEAMHGQVDCSPGIWQLDCTHLEGKVILVAVHVASGYIEAEVIPAETGQETAYFLLKLAGRPVKVIHTDNGSNFTSAAMKAACWWANVQQEFGIPYNPQSQGVVESMNKELKKVIGQVREQAEHLKTAVQMAVFIHNFKRKGGIGGYSAGERIIDIIATEIQTKEXQKQITKIQNFRVYYRDSRDPIWKGPAKLLWKGEGAVVIQDNSDIKVVPRRKAKIIRDYGKQMAGDDCVAGRQDEN

SEQ ID NO: 917 - protein, 1003 aa, Artificial
  HIV Pol
FFRENLAFQQGEARKFPSEQTRANSPTNGELGDGGRDNLLPEAGAERQETASSFSFPQITLWQRPLVTVKVGGQLKEALLDTGADDTVLEDINLPGKWKPKMIGGIGGFIKVRQYDQILIEICGKKAIGTVLVGPTPVNIIGRNMLTQIGCTLNFPISPIDTVPVTLKPGMDGPKVKQWPLTEEKIKALTEICKEMEEEGKISKIGPENPYNTPVFAIKKKDSTKWRKLVDFRELNKRTQDFWEVQLGIPHPAGLKKKKSVTVLDVGDAYFSVPLDEGFRKYTAFTIPSINNETPGVRYQYNVLPQGWKGSPAIFQSSMTKILEPFRARNPEIVIYQYMDDLYVGSDLEIGQHRTKVEDLRAHLLSWGFTTPDKKHQKEPPFLWMGYELHPDRWTVQPIVLPEKDSWTVNDIQKLVGKLNWASQIYAGIKVRQLCKLLRGAKALTDIVTLTEEAELELAENREILKTPVHGVYYDPSKDLVAEIQKQGQDQWTYQIYQEPFKNLKTGKYARKRSAHTNDVRQLAEVVQKVATESIVIWGKTPKFRLPIQRETWETWWMEYWQATWIPEWEFVNTPPLVKLWYQLEKDPIMGAETFYVDGAASRETKQGKAGYVTDRGRQKVVSLTETTNQKTELHAIHLALQDSGPEVNIVTDSQYALGIIQAQPDRSESDIVNQIIEKLIEKEKVYLSWVPAHKGIGGNEQVDKLVSSGIRKVLFLDGIDKAQEDHERYHSNWRAMASDFNLPPIVAKEIVASCDKCQLKGEAMHGQVDCSPGIWQLDCTHLEGKVILVAVHVASGYIEAEVIPAETGQETAYFLLKLAGRWPVRVIHTDNGSNFTSAAVKAACWWANVQQEFGIPYNPQSQGVVESMNKELKKIIGQVREQAEHLKTAVQMAVFIHNFKRKGGIGEYSAGERIIDIIATDIQTKALQKQITKIQNFRVYYRDSRDPIWKGPAKLLWKGEGAVVIQDNSDIKVVPRRKAKIIRDYGKQMAGDDCVAGRQNED

SEQ ID NO: 918 - protein, 1002 aa, Artificial
  HIV Pol
FFRENLAFQQGEAREFSSEQTRANSPTSRELRDGGRDNLLLEAGAERQGTSSSLSFPQITLWQRPIVTVKIGGQLKEALLDTGADDTVLEDINLPGKWKPKMIGGIGGFIKVRQYDQIIIEICGKKAIGTVLVGPTPVNIIGRNMLTQIGCTLNFPISPIDTVPVTLKPGMDGPKVKQWPLTEEKIKALTEICKEMEEEGKISKIGPENPYNTPVFAIKKKDSTKWRKLVDFRELNKRTQDFWEVQLGIPHPAGLKKKKSVTVLDVGDAYFSVPLHESRKYTAFTIPSINNETPGIRYQYNVLPQGWRGSPAIFQCSMTKILEPFRAKNPEIVIYQYMDDLYVGSDLEIGQHGTKIEELRAHLLSWGFTTPDKKHQKESPFLWMGYELHPDRWTVQPIQLPDKESWTVDDIQKLVGKLNWASQIYAGIKVKQLCKLLRGAKALTDIVPLTEEAELELAENREILKNPVHGVYYDPSKDLVAEIQKQGHNQWTYQIYQEPFKNLKTGKYARQRSAHTNDVRQLVEVVQKVSTESIVIWGKTPKFRLPIQRETWETWWMEYWQATWIPEWEFVNTPPLVKLWYQLEKDPIAGAETFYVDGAASRETKLGKAGYATDRGRHKVVSLTETTNQKTELHAIRLALRDSGSEVNIVTDSQYALGIIQAQPDRSESEIVNQIIEKLIEKEKVYLSRVPAHKGIGGNEQVDKLVSSGIRKVLFLDGIDKAQEEHERYHSNWRTMASDFNLPPIVAKEIVANCDKCQLKGEAMHGQVDCSPGIWQLDCTHLEGKVILVAVHVASGYIEAEVIPAETGQETAYFLLKLAGRWPVKVIHTDNGSNFTSATVKAACWWANVQQEFGIPYNPQSQGVVESMNKELKKIIGQVREQAEHLKTAVQMAVFIHNFKRKGGIGGYSAGERIIDIIATDIQTKELQKHITKIQNFRVYYRDSRDPIWKGPAKLLWKGEGAVVIQDNSDIKVVPRRKAKIIRDYGKQMAGDDCVAGRQDED

SEQ ID NO: 919 - protein, 1003 aa, Artificial
  HIV Pol
FFREILAFQQGKAGKFSSEQTRANSPASRKLGDGGRDNLLTEAGAERQGTSSSFSFPQITLWQRPLVTVKIGGQLKEALLDTGADDTVLEDINLPGKWKPKMIGGIGGFIKVRQYDQILIEICGKKAIGTVLVGPTPVNIIGRNMLTQIGCTLNFPISPIDTVPVTLKPGMDGPKVKQWPLTEEKIKALTEICKEMEEEGKISKIGPENPYNTPVFAIKKKDSTKWRKLVDFRELNKGTQDFWEVQLGIPHPAGLKKKKSVTVLDVGDAYFSVPLDESFRKYTAFTIPSINDETPGIRYQYNVLPQGWKGSPAIFQSSMTKILEPFRIKNPEMVIYQYMDDLYVGSDLEIGQHRTKIEELRAHLLSWGFTTPDKKHQKEPPFLWMGYELHPDRWTVQPIELPEKDSWTVNDIQKLVGKLNWASQIYAGIKVKQLCKPLRGTKALTDIVPLTEEAELELAENREILKTPVHGVYYDPSKDLVAEVQKQGQDQWTYQIYQEPFKNLKTGKYARKRSAHTNDVRQLTEVVQKIATESIVIWGKTPKFRLPIQRETWETWWMEYWQATWIPEWEFVNTPPLVKLWYQLEKDPIVGAETFYVDGAASRETKLGKAGYVTDRGRQKVVSLTETTNQKTELHAIHLALQDSGSEVNIVTDSQYALGIIQAQPDRSESEVVNQIIEELIKKEKVYLSWVPAHKGIGGDEQVDKLVSSGIRKVLFLDGIDKAQEEHERYHSNWRTMASDFNLPPIVAKEIVANCDKCQLKGEAMHGQVDCSPGIWQLDCTHLEGKVILVAVHVASGYIEAEVIPAETGQETAYFLLKLAGRWPVKVIHTDNGSNFTSAAVKAACWWANVRQEFGIPYNPQGQGVVESMNKELKEIIGQVREQAEHLKTAVQMAVFIHNFKRKGGIGGYSAGERIIDIIATDIQTKELQKQITKIQNFRVYYRDSRDPIWKGPAKLLWKGEGAVVIQDNSDIKVVPRRKAKIIRDYGKQMAGDDCVAGRQDED

SEQ ID NO: 920 - protein, 997 aa, Artificial
  HIV Pol
FFRENLAFQQRKAGEFSSEQTRANSPTSRMGDGGRDNLLTEAGAERQGSSSFSFPQITLWQRPLVTVKIGGQLKEALLDTGADDTVLEDINLPGKWKPKMIGGIGGFIKVRQYDQILIEICGKKAIGTVLVGPTPVNIIGRNMLTQIGCTLNFPISPDTVPVTLKPGMDGPKVKQWPLTEEKIKALTETCKEMEEEGKISKIGPENPYNTPVFAIKKKDSTKRKLVGFRELNKRTQDFWEVQLGIPRPAGLKKKKSVTVLDVGDAYFSVPLDESFRKYTAFTIPSINNETPGIRYQYNVLPQGWKGSPAIFQSSMTKILEPFRIKNPEMVIYQYMDDLYVGSDLEIGQHRIKIEELRAHLLSWGFTTPDKKHQKEPPFLWMGYELHPDRWTVQPIELPEKDSWTVNDIQKLVGKLNWASQIYPGIKVKQLCKLLRGAKALTDIVPLTEEAELELAENREILRTPVHGVYYDPSKDLVAEVQKQGQDQWTYQIYQEPFKNLKTGKYARKRSAHTNDVRQLTEVVQKIATESIVIWGKTPKFRLPIQRETWETWWMEYWQATWIPEWEFVNTPPLVKLWYQLEKDPIVGAETFYVDGAASRETKLGKAGYVTDRGRQKVVSLTETTNQKTELHAIHLALQDSGSEVNIVTDSQYALGIIQAQPDRSESEVVSQMIEELIKKEKDYLSWVPAHKGIGGNEQVDKLVSSGIRKVLFLDGIDKAQEEHERYHSNWRTMASDFNLPPIVAKEIVANCDKCQLKGEAMHGQVDCSPGIWQLDCTHLEGKVILVAVHVASGYIEAEVIPAETGQETAYFLLKLAGRWPVKVIHTDNGSNFTSAAVKAACWWANVRQEFGIPYNPQSQGVVESMNKELKKIIGQVREQAEHLKTAFMAVFIHNFKRKGGIGYSVGERIIDIIAADIQTKELQKQITKIQNFRVYYRDSRDPIWKGPAKLLWKGEGAVVIQDNSDIKVVPRRKAKIIRDYGKQMAGDDCVASRQDED

SEQ ID NO: 921 - protein, 995 aa, Artificial
  HIV Pol
FFRENLAFQQGKAREFSSEQTGANSSASRKLGDGGGAERQGTSSSFSFPQITLWQRPLVTIKIGGQLKEALLDTGADDTVLEDINLPGKWKPKMIGGIGGFIKVRQYDQILIEICGKKAIGTVLVGPTPVNIIGRNMLTQIGCTLNFPISPIDTVPVKLKPGMDGPKVKQWPLTEEKIKALTEICKEMEEEGKISKIGPENPYNTPVFAIKKKDSTKWRKLVDFRELNKRTQDFWEVQLGIPHPAGLKKKKSVTVLDVGDAYFSVPLDESFRKYTAFTIPSINNETPGIRYQYNVLPQGWKGSPAIFQSSMTKILEPFRIKNPEMVIYQYMDDLYVGSDLEIGQHRTKIEELRAHLLSWGFTTPDKKHQKEPPFLWMGYELHPDRWTVQPIELPEKDSWTVNDIQKLVGKLNWASQIYAGIKVKQLCKLLRGTKALTDIVPLTEEAELELEENREILRIPVHGVYYDPSKDLVAEVQKQGQDQWTYQIYQEPFKNLKTGKYSRKRSAHTNDVRQLTEVVQKIATESIVIWGKTPKFRLPIQRETWETWWMEYWQATWIPEWEFVNTPPLVKLWYQLEKDPIVGAETFYVDGAASRETKLGKAGYVTDRGRQKVISLTETTNQKTELHAIHLALQDSGSEVNIVTDSQYALGIIQAQPDRSESEVVSQIIEELIKKEKVYLSWVPAHKGIGGNEQVDKLVISGIRKVLFLDGINKAQEEHERYHSNWRTMASDFNLPPIVAKEIVANCDKCQLKGEAMHGQVDCSPGIWQLDCTHLEGKVILVAVHVASGYIEAEVIPAETGQETAYFLLKLAGRWPVKVIHTDNGSNFTSAAVKAACWWANVRQEFGIPYNPQSQGVVESMNKELKKIIGQVREQAEHLKTAVQMAVFIHNFKRKGGIGGYSAGERIIDIIATDIQTKELQKQITKIQNFRVYYRDSRDPIWKGPAKLLWKGEGAVVIQDNSDIKVVPRRKAKIIRDYGKQMAGDDCVAGRQDED

SEQ ID NO: 922 - protein, 1003 aa, Artificial
  HIV Pol
FFRENLAFQQGKAGKFSSEQTRANSPTSRELGDGGRDNLLAETGAERQGTPSSFNFPQITLWQRPLVTVKIGGELKEALLDTGADDTVLEDINLPGKWKPKMIGGIGGFIKVRQYDQILIEICGKKAIGTVLVGPTPVNIIGRNMLTQIGCTLNFPISPIDTVPVKLKPGMDGPKVKQWPLTEEKIKALTEICKEMEEEGKISKIGPENPYNTPIFAIKKKNSTRWRKLVDFRELNKRTQDFWEVQLGIPHPAGLKKKKSVTVLDVGDAYFSVPLDESFRKYTAFTIPSINNETPGIRYQYNVLPQGWKGSPAIFQSSMTKILEPFRIKNPEMVIYQYMDDLYVGSDLEIGQHRTKIEELRAHLLSWGFTTPDQKHQKEPPFLWMGYELHPDRWTVQPIELPEKDSWTVNDIQKLVGKLNWASQIYAGIKVKQLCKLLRGAKALTDIVPLTEEAELELAENREILKTPVHGVYYDPSKDLAAEVQKQGQDQWTYQIYQEPFKNLKTGKYARNRSAHTNDVRQLTEVVQKIATESIVIWGKTPKFRLPIQKETWETWWMEYWQATWIPEWEFVNTPPLVKLWYQLEKEPIIGAETFYVDGAASRETKLGKAGYVTDRGRQKVVSLTETTNQKTELHAIHLALQDSGSEVNIVTDSQYALGIIQAQPDRSESEVVNQLIEELIKKEKVYLSWVPAHKGIGGNEQVDKLVSSGIRKVLFLDGIDKAQEEHERYHSNWRTMASDFNLPPVVAKEIVANCDKCQLKGEAMHGQVDCSPGIWQLDCTHLEGKVILVAVHVASGYIEAEVIPAETGQETAYFLLKLAGRWPVKVIHTDNGSNFTSAAVKAACWWANVRQEFGIPYNPQSQGVVESMNKELKKIIGQVRDQAEHLKTAVQMAVFIHNFKRKGGIGGYSAGERIIDIIATDIQTKELQKQITKIQNFRVYYRDSRDPIWKGPAKLLWKGEGAVVIQDNSDIKVVPRRKAKIIRDYGKQMAGDDCVAGRQDED

SEQ ID NO: 923 - protein, 1008 aa, Artificial
  HIV Pol
FFRENLAFQQGKAGEFSSEQTRANSPTSRKLGDGGRDNGGRDNLLTEAGAERQGTSSSFSFPQITLWQRPLVTVKIGGQLKEALLDTGADDTVLEDINLPGKWKPKMIGGIGGFIKVKQYDQILIEICGKKAIGTVLVGPTPVNIIGRNMLTQIGCTLNFPISPIDTVPVTLKPGMDGPKVKQWPLTEEKIKALTEICKEMEEEGKISKIGPENPYNTPVFAIKKKDSTKWRKLVDFRELNKRTQDFWEVQLGIPHPAGLKKKKSVTVLDVGDAYFSVPLDESFRKYTAFTIPSINNETPGIRYQYNVLPQGWKGSPAIFQSSMTKILEPFRIKNPEMVIYQYKDDLYVGSDLEIGQHRTKIEELRAHLLSWGFTTPDKKHQKEPPFLWMGYELHPDRWTVQPIELPEKDSWTVNDIQKLVGKLNWASQIYAGIKVKQLCKLLRGAKALTDIVPLTEEAELELAENREILKTPVHGVYYDPSKDLVAEVQKQGQDQWTYQIYQEPFKNLKTGKYARRGSAHTNDVRQLTEVVQKVATESIVIWGKTPKFRLPIQRETWETWWMEYWQATWIPEWEFVNTPPLVKLWYQLEKDPIVGAETFYVDGAASRETKLGKAGYVTDRGRQKVVSLTETTNQKTELHAIHLALQDSGSEVNIVTDSQYALGIIQAQPDRSESEVVNQIIEELIKKEKVYLSWVPAHKGIGGNEQVDKLVSSGIRKVLFLDGIDKAQEEHERYHSNWRTMASDFNLPPIVAKEIVTNCDKCQLKGEAMHGQVDCSPGIWQLDCTHLEGKVILVAVHVASGYIEAEVIPAETGQETAYFLLKLAGRWPVKVIHTDNGSNFTSAAVKAACWWANVQQEFGIPYNPQSQGVVESMNKELKKIIGQVREQAEHLKTAVQMAVFIHNFKRKGGIGGYSAGERIIDIIATDIQTKELQKQITKIQNFRVYYRDSRDPIWKGPAKLLWKGEGAVVIQDNSDIKVVPRRKAKIIRDYGKQMAGDDCVAGRQDED

SEQ ID NO: 924 - protein, 1003 aa, Artificial
  HIV Pol
FFRENLAFQQGKAGKFSSEQTRTNSPTSRKLGDGGRDNLLPEAGAERQGTPSSFSFPQITLWQRPLVTVKIGGQLKEALLDTGADDTVLEDINLPGKWKPRMIGGIGGFIKVRQYDQILIEICGKKAIGTVLVGPTPVNIIGRNMLTQIGCTLNFPISPIDTVPVKLKPGMDGPKVKQWPLTEEKIKALTEICKKMEEEGKISKIGPENPYNTPVFAIKKKDSTRWRKLVDFRELNKRTQDFWEVQLGIPRPAGLKKKKSVTVLDVGDAYFSVPLDESFRKYTAFTIPSINNETPGIRYQYNVLPQGWKGSPAIFQCSTTKILEPFRTKNPEIVIYQYMDDLYVGSDLEIGQHRTKIEELRAHLLSWGFTTPGKKHQKEPPFLWMGYELHPDRWTVQPIELPEKDSWTVNDIQKLVGKLNWASQIYPGIKVKQLCKLLRGAKALTDTVPLTEEAELELAENREILKTPVHGVYYDPSKDLVAEVQKQGQDQWTYQIYQEPFKNLKTGKYARKRSAHTNDVRQLTEVVQKIATESIVIWGKTPKFKLPIQKETWETWWMEYWQATWIPEWEFVNTPPLVKLWYQLEKDPIVGAETFYVDGAASRETKLGKAGYVTNRGRQKVVSLTETTNQKSELHAIHLALQDSGSEVNIVTDSQYALGIIQAQPDRSESEVVNQIIEELIKKEKVYLSWVPAHKGIGGNEQVDKLVSSGIRKVLFLDGIDKAQEEHERYHSNWRTMASDFNLPPIVAKEIVANCDKCQLKGEAMHGQVDCSPGIWQLDCTHLEGKVILVAVHVASGYIEAEVIPAETGQETAYFLLKLAGRWPVKVVHTDNGSNFTSAAVKAACWWANVRQEFGIPYNPQSQGVVESMNKELKKIIGQVREQAEHLKTAVQMAVFIHNFKRKGGIGGYSAGERIIDIIATDIQTKELQKQITKIQNFRVYYRDSRDPIWKGPAKLLWKGEGAVVIQDNSDIKVVPRRKAKIIRDYGKQMAGDDCVAGRQDED

SEQ ID NO: 925 - protein, 1003 aa, Artificial
  HIV Pol
FFRENLAFQQGEARKFSSKQTGTNSPTSRELGDGGRDNLPSEAGSEGPGTISSLSFPQITLWQRPLVTVKIGGQLIEALLDTGADDTVLEEINLPGKWKPKMIGGIGGFIKVRQYDQILIEICGKKAIGTVLVGPTPVNIIGRNMLTQIGCTLNFPISPIETVPVKLKPGMDGPKVKQWPLTEEKIKALTEICTEMEKEGKISKIGPENPYNTPVFGIKKRDSTKWRKLVDFRELNKRTQDSWEVQLGIPHPAGLKKKKSVTVLDVGDAYFSVPLDKDFRKYTAFTIPSTNNETPGIRYQYNVLPQGWKGSPAIFQASMTNILEHYRIKNPEIMIYQYMDDLYVGSDLEIEQHRAKIEELREHLLKWGFTTPDKKHQKEPPFLWMGYELHPDKWTVQPIQLPEKDSWTVNDIQKLVGKLNWASQIYAGIKVKQLCKLLRGAKALTDIVPLTEEAELELAENREILKEPVHGVYYDPAKDLIAEIQKQGQDQWTYQIYQEPFKNLKTGKYAKRRSAHTNDVKQLAEVVQKVVTESIVIWGKTPKFRLPIQRETWEAWWMEYWQATWIPDWEFVNTPPLVKLWYQLEKDPIVGAETFYVDGAANRETKLGKAGYVTDRGRQKVVSLTETTNQKTELHAIYLALQDSGSEVNIVTDSQYALGIIQAQPDRSESELVNQIIEKLIEKDKVYLSWVPAHKGIGGNEQVDKLVSNGIRKVLFLDGIDKAQEEHGRYHSNWRAMASDFNLPPIIAKEIVACCDQCQLKGEAMHGQVDCGPGIWQLDCTHLEGKIILVAVHVASGYIEAEVIPAETGQETAYFILKLAGRWPVKVIHTDNGSNFTSAAVKAACWWANVTQEFGIPYNPQSQGVVEAMNKELKKIIGQVRDQAEHLKTAVQMAVFIHNFKRKGGIGGYSAGERIIDIIASDIQTKELQKQITKIQNFRVYYRDSRDPIWKGPAKLLWKGEGAVVIQDKSDIKVVPRRKAKIIKDYGKQMAGDDCVAGRQDED

SEQ ID NO: 926 - protein, 1003 aa, Artificial
  HIV Pol
FFRENLAFQQGEARKFSSKQTGTNSPTSRELWDGGRDNLPSEAGTEGPGTISPSSFPQITLWQRPLVTVRIGGQLIEALLDTGADDTVLEEINLPGKWKPKMIGGIGGFIKVRQYDQILIEICGKKAIGTVLVGPTPVNIIGRNMLTQIGCTLNFPISPIETVPVKLKPGMDGPKVKQWPLTEEKIKALTDICAEMEKEGKISKIGPENPYNTPVFAIKKKDSTKWRKLVDFRELNKRTQGFWEVQLRIPHPAGLKKKKSVTVLDVGDAYFSVPLDKDFRKYTAFTIPSVNNETPGIRYQYNVLPQGWKGSPAIFQASMTKILEPFRIKNPEIVIYQYMDDLYVGSDLEIGQHRAKIEELREHLLKWGFTTPDKKHQKEPPFLWMGYELHPDKWTVQPIQLPEKDSWTVNDIQKLVGKLNWASQIFAGIKVKQLCRLLRGAKALTDIVPLTEEAELELAENREILKEPVHGVYYDPAKDLIAEIQKQGQDQWTYQIYQEPFKNLKTGKYAKRRSAHTNDVKQLTEVVQKVATESIVIWGKTPKFSLPIQRETWEAWWMEYWQATWIPDWEFVNTPPLVKLWYQLEKDPIVGAETFYVDGAANKETKLGKAGYVTDRGRQKVVSLTETTNQKTELHAIYLALQDSGSEVNIVTDSQYALGIIQAQPDRSESELVNQIIEKLIEKDKVYLSWVPAHKGIGGNEQVDKLVSNGIRKVLFLDGIDKAQEEHERYHSNWRAMASDFNLPPIVAKEIVACCDKCQLKGEAMHGQVDCSPGIWQLDCTHLEGKIILVAVHVASGYIEAEVIPAETGQETAYFILKLAGRWPVKVIHTDNGSNFTSAAVKAACWWANVTQEFGIPYNPQSQGVVESMNKELKKIIGQVRDQAEHLKTAVQMAVFIHNFKRKGGIGGYSAGERIIDIIASDIQTKELQKQIIKIQNFRVYYRDSRDPIWKGPAKLLWKGEGAVVIQDKSDIKVVPRRKAKIIKDYGKQMAGDDCVAGRQDED

SEQ ID NO: 927 - protein, 1003 aa, Artificial
  HIV Pol
FFRENLAFQQREARELSSEQTGAISPTGRELWDKGRNNLLSAAGTEGQGTISSFNFPQITLWQRPLVTVRIGGQLIEALLDTGADDTVLEDINLPGKWKPKMIGGIGGFIKVRQYDQIPIEICGKKAIGTVLVGPTPVNIIGRNMLTQIGCTLNFPISPIETVPVKLKPGMDGPKVKQWPLTEEKIKALTDICMEMEKEGKISKIGPENPYNTPIFAIKKKDSTKWRKLVDFRELNKRTQDFWEVQLGIPHPAGLKKKKSVTVLDVGDAYFSVPLDKDFRKYTAFTIPSINNETPGIRYQYNVLPQGWKGSPAIFQSSMTKILEPYRIKNPEIVIYQYMDDLYVGSDLEIGQHRAKIEELREHLLRWGFTTPDKKHQKEPPFLWMGYELHPDKWTVQPIMLPEKDSWTVNDIQKLVGKLNWASQIYAGIKVKELCKLLRGAKALTDIVTLTEEAELELAENREILKEPVHGVYYDPTKDLIAEIQKQGQDQWTFQIYQEPFKNLKTGKYQERVAPYDLSITELTEVVQKVTTESIIIWGKTPKFRLPIQRETWEAWWMEYWQATWIPEWEFVNTLPLVKLWYQLEKDPIVGAETFYVDGAANRETKLGKAGYVTDRGRQKVVSLTETTNQKTELHAIHLALQDSGSEVNIVTDSQYALGIIQAQPDRSESELVNQIIEKLIGKDKVYLSWVPAHKGIGGNEQVDNLVSSGFRKILFLDGLDKAQEEHEKFHSNWRAMASDFNLPPIVAKEIVASCDKCQLKGEAMHGQVDCSPGIWQLDCTHLEGKIILVAVHVASGYIEAEVIPAETGQETAYFILKLAGRWPVKIIHTDNGSNFTSAAVRAACWWANVTQEFGIPYNPQSQGVVESMNKELKKIIGQVRDQAEHLKTAVQMAVFIHNFKRKGGIGGYSAGERIIDIIASDIQTKELQKQITKIQNFRVYYRDSRDPIWKGPAKLLWKGEGAVVIQDNSDIKVVPRRKAKILRDYGKQMAGDDCVAGRQDED

SEQ ID NO: 928 - protein, 1003 aa, Artificial
  HIV Pol
FFRENLAFQQGEARKFSSEQTGTNSSTSRELWDGGRDTSLSTAGTEGQGAISSFNFPQITLWQRPLVTVRIEGQLIEALLDTGADDTVLEDINLPGKWKPKMIGGIGGFIKVRQYDQILIEICGKKAIGTVLVGPTPVNIIGRNMLTQIGCTLNFPISPIETVPVKLKPGMDGPKVKQWPLTEEKIKALTDICTEMEKEGKISKIGPENPYNTPVFAIKKKDSTKWRKLVDFRELNKRTQDFWEVQLGIPHPAGLKKKKSVTVLDVGDAYFSVPLDKDFRKYTAFTIPSVNNETPGIRYQYNVLPQGWKGSPAIFQASMTKILEPFRTKNPEIVIYQYMDDLYVGSDLEIGQHRAKIEELRGHLLKWGFTTPDKKHQKEPPFLWMGYELHPDKWTVQPVELPEKDSWTVNDIQKLVGKLNWASQIYAGIKIKQLCRLLRGAKALTDIVALTEEAELELAENREILKEPVHGVYYDPTKDLVAELQKQGQDQWTYQIYQEPFKNLKTGKYAKKRSAHTNDVKQLTEVVQKVAMESIVIWGKTPKFRLPIQRETWETWWMEYWQATWIPEWEFVNTPPLVKLWYQLEKDPIVGAETFYVDGAANRETKIGKAGYVTDRGRQKVVSLTETTNQKTELHAIHLALQDSGSEVNIVTDSQYALGIIQAQPDRSESELVNQIIEKLIKKDKVYLSWVPAHKGIGGNEQVDKLVSNGIRKVLFLDGIDKAQEEHERYHSNWKAMASDFNLPPIVAKEIVASCDKCQMKGEAMHGQVDCGPGIWQLDCTHLEGKIILVAVHVASGYIEAEVIPAETGQETAYFILKLAGRWPVKVIHTDNGSNFTSAAVKAACWWANVTQEFGIPYNPQSQGVVESMNKELKKIIGQVRDQAEHLKTAVQMAVFIHNFKRKGGIGGYSAGERIIDIIASDIQTKELQKQIIKIQNFRVYYRDSRDPIWKGPAKLLWKGEGAVVIQDNSDIKVVPRRKAKIIRDYGKQMAGDDCVAGRQDED

SEQ ID NO: 929 - protein, 1003 aa, Artificial
  HIV Pol
FFRENLAFQQGEARKFSSEQTGTNSPASREPWDRGRDNLLSEAGTGGQGTISSLSFPQITLWQRPLVTVKIGGQLIEALLDTGADDTVLEEINLPGKWKPKMIGGIGGFIKVRQYDQILIEICGKKAIGTVLVGPTPVNIIGRNMLTQIGCTLNFPISPIETVPVKLKPGMDGPKVKQWPLTEEKIKALTDICTEMEKEGKISRIGPENPYNTPIFAIKKKNSTRWRKLVDFRELNKRTQDFWEIQLGIPHPAGLKKKKSVTVLDVGDAYFSVPLDKDFRKYTAFTIPSINNETPGIRYQYNVLPQGWKGSPAIFQASMTKILEPFRTKNPEIVIYQYMDDLYVGSDLEIGQHRAKIEELREHLLRWGFTTPDEKHQKEPPFLWMGYELHPDKWTVQPIVLPEKDSWTVNDIQKLVGKVNWQVRIYAGIKVKQLCKLLRGAKTLTDIVTLTEEAELELAENREILKEPVHGVYYDPTKDLVAEIQKQGQDQWTYQIYQEPFKNLKTGKYAKKRSAHTNDVKQLTEVVQKVATESIVIWGKTPKFRLPIQRETWEAWWMEYWQATWIPEWEFVNTPPLVKLWYQLEKDPIVGAETFYVDGAANRETKIGKAGYVTDRGRQKVVSLAETTNQKTELHAIHLALQDSGSEVNIVTDSQYALGIIQAQPDRSESELVTQIIEELIKKDRVYLSWVPAHKGIGGNEQVDKLVSSGIRKVLFLDGIDKAQEEHERYHSNWRAMASDFNLPPVVAKEIVASCDKCQLKGEAMHGQVDCSPGIWQLDCTHLEGKIILVAVHVASGYIEAEVIPAETGQETAYFILKLAGRWPVKVIHTDNGSNFTSAAVKAACWWANVTQEFGIPYNPQSQGVVESMNKELKKIIGQVRDQAEHLKTAVQMAVLIHNFKRRGGIGGYSAGERIIDIIASDIQTKELQKQITKIQNFRVYYRDSRDPIWKGPAKLLWKGEGAVVIQDNSDIKVVPRRKVKIVRDYGKQMAGDDCVAGRQDED

SEQ ID NO: 930 - protein, 1001 aa, Artificial
  HIV Pol
FFRENLAFQQGEARKLSSEQTGTNSPTSRELWDGGRDNLLPEAGTGGQGTIPSFNFPQITLWQRPLFTVRIEGQLIKALLDTGANDTVLEKINLPGKWKPKMIGGIGGFIKLRQYDQILIEICGKKAMGSVLVGPTPVNIIGKNILTQIGCTLNFPISPIETVPLKLKPGMDGPKVKQWPLTEEKLKHLTDICAEMEKEGKISKIGPENPYNTPVFAIKRKDSTKWRKLVDFRELNKRTQDFWEVQLGIPHPAGLKKKKSVTVLDVGDAYFSVPLDEDFRKYTAFTIPSVNNETPGIRYQYNVLPQGWKGSPAIFQASMTKILEPFRTKNPELVIYQYMDDLYVGSDLEIGQHRAKIEELREHLLKWGFTTPDKKHQKEPPFLWMGYELHPDKWTVQPIQLPEKDSWTVNDIQKLVGKLNWASQIYPGIKVKQLCKLLRGTKALTDIVPLTEEAELELAENREILKEPVHGVYYDPTKDLIAEIQKQGQDQWTYQIYQEPFKNLKTGKYAKKRSAHTNDVKQLTEVVQKVATESIVVWGKTPKFRLPIQRETWEAWWMEYWQATWIPEWEFVNTPPLVKLWYQLEKDPIIGAETFYVDGAANRETKLGRAGYVTDRGRQNVVSLTETTNQKTELHAILLALQESGSEVNIVTDSQYALGIIQAQPDRSESELVNQIIEKLIEKDKVYLSWVPAHKGIGGNEQVDKLVSKGIRKVLFLDGIDKAQEEHERYHSNWRAMASEFNLPPIVAKEIVASCDKCQLKGEAMHGQVDCSPGIWQIDCTHLEGKIIIVAVHVASGYIEAEVIPAETGQETAYFILKLAGRWPKVVHTDNGSNFTSAAVKAACWWPKLHQELGIYNPQSQGVVESMNKELKKIIGQVRDQAEHLKTAVQMAVFIHNFKRRGGIGGYSAGERIIDIIASDIQTKELQKQITNIQKFRVYYRDSRDPIWKGPAKLLWKGEGAVVIQDNSDIKVVPRRKTKILRDYGKQMAGDDCVAGGQNED

SEQ ID NO: 931 - protein, 1003 aa, Artificial
  HIV Pol
FFRENLAFQQREARKFSSEQTRAISPTSRKLWDGGRDNPLPETGTEGQGTASSFNFPQITLWRRPLVTVRIGGQLKEALLDTGADDTVLEDINLPGKWKPKMIGGIGGFIKVRQYDQILIEICGKKAIGTVLVGPTPVNIIGRNMLTQLGCTLNFPISPIETVPVTLKPGMDGPKVKQWPLTEEKIKALTDICKEMEKEGKISKIGPENPYNTPVFAIKKKDSTKWRKLVGFRELNKRTQDFWEVQLGIPHPAGLKKKKSVTVLDVGDAYFSVPLDQDFRKYTAFTIPSTNNETPGIRYQYNVLPQGWKGSPAIFQSSMTKILEPFRKQNPEIVIYQYMDDLYVGSDLEIGQHRTEIEELREHLLRWGFTTPDKKHQKEPPFLWMGYELHPDKWTVQPIVLPEKDSWTVNDIQKLVGKLNWASQIYAGIKVRQLCKLLRGAKALTEVIPLTAEAELELAENREILKEPVHGVYYDPSKDLVAEIQKQGQGQWTYQIYQEPFKNLKTGKYARLRGAHTNDVKQLTEAVQKIATESIVIWGKTPKFKLPIQKETWETWWTEYWQATWIPEWEFVNTPPLVKLWYQLEKEPIVGAETFYVDGAANRETKSGKAGYVTDRGRQKVVSLTDTTNQKTELQAIHLALQDSGLEVNIVTDSQYALGIIQAQPDKSESELVSQIIEQLIKKEKVYLAWVPAHKGIGGNEQVDKLVSAGIREVLFLDGIDKAQEEHEKYHGNWRAMASDFNLPPVVAKEIVASCDKCQLKGEAMHGQVDCSPGIWQLDCTHLEGKIILVAVHVASGYIEAEVIPAETGQETAYFVLKLAGRWPVKIIHTDNGSNFTSTAVKAACWWAGIKQEFGIPYNPQSQGVVESMNKQLKQTIGQVRDQAEHLKTAVQMAVFIHNFKRKGGIGGYSAGERIIDIIATDIQTKELQKQIIKIQNFRVYYRDSRDPIWKGPAKLLWKGEGAVVIQDNNDIKVVPRRKAKIIRDYGKQMAGDDCVASRQDED

SEQ ID NO: 932 - protein, 1003 aa, Artificial
  HIV Pol
FFRENLAFQQREARKFSSEQTRAISPTSRKLWDGGRDNPLPETGTERQGTASSFNLPQITLWQRPLVTVRIGGQLKEALLDTGADDTVLEDINLPGKWKPKMIGGIGGFIKVRQYDQILIEICGKKAIGTVLVGPTPVNIIGRNMLTQLGCTLNFPISPIETVPVTLKPGMDGPKVKQWPLTEEKIKALIDICKEMEKEGKISKIGPENPYNTPVFVIKKKDSTKWRKLVDFRELNKRTQDFWEVQLGLPHPAGLKKKKSVTVLDVGDAYFSVPLDQDFRKYTAFTIPSTNNETPGIRYQYNVLPQGWKGSPAIFQSSMTKILEPFRKQNPEIVIYQYMDDLYVGSDLEIGQHRIKIEELRDHLLRWGFTTPDKKHQKEPPFLWMGYELHPDKWTVQPIVLPEKDSWTVNDIQKLVGKLNWASQIYAGIKVRQLCKLLRGAKALTEIIPLTAEAELELAENREILKVPVHGVYYDPSKDLVAEIQKQGQGQWTYQIYQEPFKNLKTGKYARLRSAHTNDVKQLTEAVQKIATESIVIWGKTPKFKLPIQKETWETWWAEYWQATWIPEWEFVNTPPLVKLWYQLEKEPIVGAETFYVDGAANRETKSGKAGYVTDRGRQKVVSLTDITNQKTELHAIHLALQDSGLEVNIVTDSQYALGIIQAQPDKSESELVSQIIEQLIKKEKFYLAWVPAHKGIGGNEQVDKLVSAGIRKVLFLDGIDKAQEAHEKYHSNWRAMASDFNLPPVVAKEIVASCDKCQLKGEAMHGQVDCSPGIWQLDCTHLEGKIILVAVHVASGYIEAEVIPAETGQETAYFVLKLAGRWPVKVIHTDNGSNFISTAVKAACWWAGIKQEFGIPYNPQSQGVVESMNKQLKQIIGQVRDQAEHLKTAVQMAVFIHNFKRKGGIGGYSAGERIIDIIATDIQTKELQKQIIKIQNFRVYYRDSRDPIWKGPAKLLWKGEGAVVIQDNNDIKVVPRRKAKIIRDYGKQMAGDDCVASRQDED

SEQ ID NO: 933 - protein, 1002 aa, Artificial
  HIV Pol
FFRENVAFQQREARKFSSEQARANSPARGMLREERGDNLLSEAGTEGQGTISFNFPQITLWQRPLVTIKLGGQIREALLDTGADDTVLEEINLPGKWKPKMIGGIGGFIKVRQYDQIPIEICGKKAIGTVLVGPTPVNIIGRNMLTQLGCTLNFPISPIETVPVKLKPGMDGPKVKQWPLTEEKIKALTEICTDMEKEGKISKIGPENPYNTPIFAIKKKDSTKWRKLVDFRELNKRTQDFWEVQLGIPHPAGLKKKKSVTVLDVGDAYFSVPLDPEFRKYTAFTIPSTNNETPGIRYQYNVLPQGWKGSPAIFQCSMTKILEPFRFKNPEIVIYQYMDDLYVGSDLEIGQHRAKIEELREHLLRWGFTTPDKKHQKEPPFLWMGYELHPDKWTVQPIQPAEKDSWTVNDIQKLVGKLNWASQIYPGIKVKQLCKLLRGAKALTDIVPLTTEAELELAENREILKEPVHGAYYDPSKDLIAEIQKQGQGQWTYQIYQEPHKNLKTGKYARTRSAHTNDVRQLTEAVQKIAMECIVIWGKTPKFRLPIQKETWDTWWTEYWQATWIPEWEFVNTPPLVKLWYQLETDPIAGAETFYVDGAANRETKQGKAGYVTDRGRQKVVSLSETTNQKTELQAIYLALQDSGSEVNIVTDSQYAIGIIQAQPDRSESDLVNQIIEQLIRKDKVYLSWVPAHKGIGGNEQVDKLVSNGIRKVLFLDGIDKAQEEHEKYHNNWRAMASDFNLPSVVAKEIVASCNKCQLKGEAMHGQVDCSPGIWQLDCTHLEGKVIMVAVHVASGYIEAEVIPAETGQETAYFILKLAGRWPVKMIHADNGPNFTSAAVKAACWWADINQEFGIPYNPQSQGVVESMNKELKKIIGQVRDQAEHLKTAVQMAVFIHNFKRKGGIGGYSAGERIIDIIASDIQTKELQKQITKIQNFRVYYRDSREPIWKGPAKLLWKGEGAVVIQDNSDIKVVPRRKAKIIRDYGKQMAGNDCVAGRQDED

SEQ ID NO: 934 - protein, 1001 aa, Artificial
  HIV Pol
  misc_feature (767)..(767): Xaa can be any naturally occurring amino acid
FFRENVAFQQRKAGEFSSEQARANSPTRRELRDERGDNLLSEAGTEGQGTISFNFPQITLWQPPLVTIKIGGQIREALLDTGADDTVLEDINLPGKWKPKMIGGIGGFIKVKQYDQILIEICGKKAIGTVLVGPTPVNIIGRNLLTQIGCTLNFPISPIETVPVKLKPGMDGPKVKQWPLTEEKIKALTEICTEMEKEGKISKIGPENPYNTPIFAIKKKNSTRWRKLVDFRELNKRTQDFWEVQLGIPHPAGLKKKKSVTVLDVGDAYFSVPLDPAFRKYTAFTIPSTNNETPGVRYQYNVLPQGWKGSPAIFQYSMTKILEPFRTRNPEIVIYQYMDDLYVGSDLEIGQHRTKIEELREHLLRWGFYTPDKKHQKEPPFLWMGYELHPDKWTVQPIQLPEKDSWTVNDIQKLVGKLNWASQIYPGIKVKQLCKLLRGTKALTDIVPLTTEAELELAENREILKEPVHGAYYDPSKDLIAKIQKQGQGQWTYQIYQEPYKNLKTGKYAKTRSAHTNDVRQLTEVVQKIAMECIVIWGKTPKFRLPIQKETWDTWWTEYWQATWIPEWEFVNTPPLVKLYQLEPDPIAGAETFYVDGAASRETRRGKAGYVTDRGRQKVVSLSETTNQRTELQAIYLALKDSGSEVNIVTDSQYAIGIIQAQPDRSESDLVNQIIELLIQKDKVYLSWVPAHKGIGGNEQVDKLVSNGIRKVLFLDGIDKAQEDHEKYHSNWRAMASDFNLPPVVAKEIVASCNKCQLKGEAMHGQXDCSPGIWQLDCTHLEGKIILVPVHVASGYIEAEVIPAETGQETAYFILKLAGRWPVKIIHTDNGPNFTSAAVKAACWWADVQQEFGIPYNPQSQGVVESMNKELKKIIKQVRDQAEHLKTAVQMAVFIHNFKRKGGIGGYSAGERIIDIIASDIQTKELQKQITKIQNFRVYYRDSRDPIWKGPAKLLWKGEGAVVIQDNSDIKVVPRRKAKIIRDYGKQMAGDDCVAGRQDED

SEQ ID NO: 935 - protein, 1002 aa, Artificial
  HIV Pol
  misc_feature (491)..(491): Xaa can be any naturally occurring amino acid
FFRENVAFQQGEARKFSSEQDRANSPARRELRDERGDNLLSEAGTEGQGTISHNFPQITLWQRPLVTIKIGGQLREALLDTGADDTVLEEINLPGRWKPKMIGGIGGFIKVRQYDQITIEICGKKATGTVLVGPTPANIIGRNMLTQLGCTLNFPISPIETVPVKLKPGMDGPKVKQWPLTEEKIKALREICTEMEQEGKISKVGPENPYNTPIFAIKKKNSNRWRKLVDFRELNKRTQDFWEVQLGIPHPAGLKKKKSVTVLDVGDAYFSVPLDPEFRKYTAFTIPSINNETPGIRYQYNVLPQGWKGSPAIFQCSMTKILEPFRTKNPEMVIYQYMDDLYVGSDLEIGQHKAKIEELREHLLRWGFFTPDQKHQKEPPFLWMGYELHPDKWTVQPIQLVEKESWTVNDIQKLVGKLNWASQIYAGIKVKQLCKLLRGAKALTDIVPLTTEAELELAENREILKEPVHGAYYDPSKDLIAEIQKQGLGQXTYQIYQEPYKNLKTGKYAKTRSAHTNDVRQLTEAVQKIAMECIVIWGKTPKFRLPIQKETWDTWWMEYWQATWIPEWEFVNTPPLVKLWYQLETEPIAGAETFYVDGAASRETNQGKAGYVTDRGRQKVITLPETTNQKTELQAIYLALQDSGSEVNIVTDSQYAMGIIQAKPDKSESDLVNQIIEQLIQKDKVYLSWVPAHKGIGGNEQVDKLVSNGIRKVLFLDGIDKAQEEHEKYHNNWKAMASDFNLPPVVAKEIVASCNKCQLKGEAMHGQVDCSPGIWQLDCTHLEGKIILVAVHVASGYIEAEVIPAETGQETAYFILKLAGRWPVKIIHTDNGSNFTSAAVKAACWWANIQQEFGVPYNPQSQGVVESMNKELKKIIGQVRDQAEHLKTAVQMAVFIHNFKRKGGIEGYSAGERIIDIIASDIQTKELQKQIIKIQNFRVYYRDSKDPIWKGPAKLLWKGEGAVVIQDNSDIKVVPRKKAKIIRDYGKQMAGDDCVAGRQDED

SEQ ID NO: 936 - protein, 1003 aa, Artificial
  HIV Pol
FFRESLAFPQGEARELPPEQTGALSPASRELQVWGGDSLLSEAGAEGRGTVPSLSFPQITLWQRPVVTIRIGGQLKEALLDTGADDTVLEDINLPGKWKPKMIGGIGGFIKVRQYDQILVEICGQKAIGTVLVGPTPVNIIGRNLLTQIGCTLNFPISPIETVPVKLKPGMDGPKVKQWPLTEEKIKALTEICTDMEKEGKISRIGPENPYNTPIFAIKKKDSTRWRKLVDFRELNKRTQDFWEVQLGIPHPAGLKKKKSITVLDVGDAYFSVPLDKEFRKYTAFTIPSINNETPGIRYQYNVLPQGWKGSPAIFQCSMTKILEPFRKQNPEVVIYQYMDDLYVGSDLEIGQHRAKIKELREHLLAWGFTTPDKKHQKEPPFLWMGYELHPDKWTVQPIQLPDKDSWTVNDIQKLVGKLNWASQIYPGIKVKQLCKLLRGTKALTEVIPLTEEAELELAENREILKEPVHGVYYDPSKDLIAEVQKQGLGQWTYQIYQEPFKNLKTGKYARARGVHTNDVKQLAEAVQKIATESIVIWGKTPKFRLPIQKETWEIWWTEYWQATWIPEWEFVNTPPLVKLWYQLEKEPILGAETFYVDGAANRETKLGKAGYITDKGRQKAVSLTETTNQKAELQAIHLALQDSGLEVNIVTDSQYALGIIQAQPDKSESELVNQIIEQLIEKKKVYLSWVPAHKGIGGNEQVDKLVSAGIRKVLFLDGIDKAQDEHEKYHSNWRAMASDFNLPPVVAKEIVASCDKCQLKGEAMHGQVDCSPGIWQLDCTHLEGKVILVAVHVASGYIEAEVIPAETGQDTAYFILKLAGRWPVKMIHTDNGPNFTSGAVKAACWWAGIQQEFGIPYNPQSQGVVESMNKELKKIIGQVRDQAEHLKTAVQMTVFIHNFKRKGGIGGYGAGERIIDIITTDIQTKELQKQIIKIQNFRVYYRDSRDPVWKGPAKLLWKGEGAVVIQDNSEIKVVPRRKAKIIRDYGKQMAGDDCVAGRQDED

SEQ ID NO: 937 - protein, 1003 aa, Artificial
  HIV Pol
FFRESLAFPQGKAREFPPEQARTLSPTSRELRVWRGDNPLAEAGAEGRGEVPSLSFPQITFWQRPVVTIKIEGQLKEALLDTGADDTVLEEMNLPGKWKPKMIGGIGGFIKVRQYDQILIEICGHKAVGTVLVGPTPVNIIGRNLLTQIGCTLNFPISPIETVPVKLKPGMDGPKVKQWPLTEEKIKALTEICTDMEKEGKISRIGPENPYNTPIFAIKKKDSTRWRKLVNFRELNKKTQDFWEVQLGIPHPAGLKKKKSVTVLDVGDAYFSVPLHEDFRKYTAFTIPSINNETPGFRYQYNVLPQGWKGSPAIFQCSMTKILEPFRKQNPEMVIYQYMDDLYVGSDLEIGQHRTKIEELREHLLKWGFTTPDKKHQKEPPFLWMGYELHPDKWTVQPIQLPNKDSWTVNDIQKLVGKLNWASQIYPGIKVKQLCKLLRGTKALTEVVPLTEEAELELAENREILKEPVHGVYYDPAKDLIAEIQKQGQEQWTYQIYQEPFKNLKTGKYARTRNAHTNDVKQLAEAVQKIATESIVIWGKTPKFRLPIQKETWETWWTEYWQATWIPEWEFVNTPPLVKLWYQLEKEPIMGAETFYVDGAANRETKLGKAGYVTDKGRQKAVSLTETTNQKTELHAIYLALQDSGSEVNIVTDSQYALGIIQAQPDKSESELVNKIIEQLVQKERVYLSWVPAHKGIGGNEQVDKLVSNGIRKILFLDGIDKAQEEHEKYHNNWRAMASDFNLPPVVAKEIVASCDKCQLKGEAMHGQVDCSPGIWQLDCTHLEGKVILVAVHVASGYIEAEVIPAETGQETAYFILKLAGRWPVKMVHTDNGSNFTSAAVKAACWWAGIKQEFGIPYNPQSQGVVESMNKELKKIIGQVRDQAEHLKTAVQMAVFIHNFKRKGGIGGYSAGEGIIDIISTDIQTKELQKQITKIQNFRVYYRDSRDPVWKGPAKLLWKGEGAVVIQDNSEIKVVPRRKAKIIRDYGKQMAGDDCVAGRQDED

SEQ ID NO: 938 - protein, 1005 aa, Artificial
  HIV Pol
FFRENLAFQQGEAREFSSEQARANSPTHRELRFRRGDSPLPETGVEGEGGKGAISLSLPQITLWQRPLVTVRIGGQLIEALLDTGADDTVLEDINLPGKWKPKMIGGIGGFIKVKQYDQILIEICGKKAIGTVLVGPTPINIIGRNMLTQIGCTLNFPISPIETVPVKLKPGMDGPKVKQWPLTEEKIKALTEICKEMEKEGKISKIGPENPYNTPVFAIKKKDSTKWRKLVDFRELNKRTQDFWEVQLGIPHPAGLKKKKSVTVLDVGDAYFSIPLDEKFRKYTAFTIPSTNNETPGIRYQYNVLPQGWKGSPAIFQSSMIKILEPFRIKNPEIVIYQYMDDLYVGSDLEIGQHRAKIEELREHLLKWGLTTPDKKHQKEPPFLWMGYELHPDKWTVQPIQLPDKESWTVNDIQKLVGKLNWASQIYPGIKVRQLCKLLRGAKALTDIVPLTAEAELELAENREILKEPVHGVYYDPSKDLIAEVQKQGYGQWTYQIYQEPHKNLKTGKYARIKSAHTNDVKQLTEAVQKIALESIVIWGKTPKFRLPIQKETWETWWTEYWQATWIPEWEFVNTPPLVKLWYQLETEPIVGAETFYVDGAANRETKQGKAGYVTDRGRQKVVTLTETTNQKTELQAINLALQDSGPEVNIVTDSQYALGIIQAQPDKSESELVNQIIEQLIKKEKIYLSWVPAHKGIGGNEQVDKLVSNGIRKVLFLDGIDKAQEDHERYHSNWRAMANDFNLPPIVAKEIVASCDKCQLKGEAIHGQVDCSPGIWQLDCTHLEGKIILVAVHVASGYIEAEVIPAETGQETAYFILKLAGRWPVKVIHTDNGSNFTSAAVKAACWWANITQEFGIPYNPQSQGVVESMNKELKKIIGQVREQAEHLKTAVQMAVFIHNFKRKGGIGGYSAGERIIDIIASDIQTKELQKQIIKIQNFRVYYRDSRDPIWKGPAKLLWKGEGAVVIQDNSEIKVVPRRKAKIIRDYGKQMAGDDCVAGRQDED

SEQ ID NO: 939 - protein, 1002 aa, Artificial
  HIV Pol
FFREDLAFQQGEARKFSSEQARANSPTRGELRVRRGDSPLPGAEAEGKGAISLNFPQITLWQRPLVTVRIGGQLIEALLDTGADDTVLEDINLPGKWKPKMIGGIGGFIKVRQYDQILIEICGKRAMGTVLVGPTPVNIIGRNMLTQIGCTLNFPISPIETVPVKLKPGMDGPKVKQWPLTEEKIKALTEICTEMEKEGKISRIGPENPYNTPIFAIKKKDSTKWRKLVDFRELNKRTQDFWEVQLGIPHPAGLKKKKSVTVLDVGDAYFSIPLDKDFRKYTAFTIPSTNNETPGIRYQYNVLPQGWKGSPAIFQCSMTKILDPFRIKNPELVIYQYMDDLYVGSDLEIGQHRAKIEELREHLLKWGFTTPDKKHQKEPPFLWMGYELHPDKWTVQPIQLPNKESWSINDIQKLVGKLNWASQIYSGIKVRQLCKLLRGAKALTDIVPLTAEAELELAENREILKEPVHGAYYDPSKDLIAEIQKQGQGQWTYQIYQEPHKNLKTGKYAKIKSTHTNDVKQLTEAVQKIARESIVIWGKTPKFRLPIQKETWETWWTEYWQATWIPEWEFVNTPPLVKLWYQLETEPIVGAETFYVDGAANRETKKGKAGYVTDRGRQKVVSLAETTNQKTELQAINLALQDSGSEVNIVTDSQYALGIIQAQPDKSESELVNQIIEQLIKKEKVYLSWVPAHKGIGGNEQVDKLVSNGIRKVLFLDGIDKAQEDHERYHSNWRAMASDFNLPPIVAKEIVASCDKCQLKGEAMHGQVDCSPGIWQLDCTHLEGKIILVAVHVASGYIEAEVIPAETGQETAYFILKLAGRWPVKVIHTDNGSNFTSAAVKAACWWANITQEFGIPYNPQSQGVVESMNKELKKIIGQVREQAEHLKTAVQMAVFIHNFKRKGGIGGYSAGERIIDIIASDIQTKELQKQITKIQNFRVYYRDSRDPIWKGPAKLLWKGEGAVVIQDNSEIKVVPRRKAKIIKDYGKQMAGDDCVAGRQDED

SEQ ID NO: 940 - protein, 1004 aa, Artificial
  HIV Pol
FFRENLAFQQGEAGELSSEQARANSPTRRELRVRRGDSPLPEAGTEGKGKGAISLSFPQITLWQRPLVTVGIEGQLIEALLDTGADDTVLEDINLPGKWKPKMIGGIGGFIKVRQYDQILIEICGKKAMGTVLVGPTPVNIIGRNMLTQIGCTLNFPISPIETVPVKLKPGMDGPKIKQWPLTEEKIKALTEICTEMEKEGKISKIGPENPYNTPIFAIKKKDSTKWRKLVDFRELNKRTQDFWEVQLGIPHPAGLKKRKSVTVLDVGDAYFSVPLGENFRKYTAFTIPSLNNETPGIRYQYNVLPQGWKGSPAIFQSSMIKILEPFRTKNPEIVIYQYMDDLYVGSDLEIGQHRAKIEELREHLLKWGFTTPDKKHQKEPPFLWMGYELHPDKWTVQPIQLPDKDSWTVNDIQKLVGKLNWASQIYPGIKVKHLCKLLRGAKALTDIVPLTAEAELELAENREILKEPVHGVYYDPLKDLIAELQKQGQGQWTYQIYQEPHKNLKTGKYARMRSAHTNDIKQLTEAVQKIALEAIVIWGKIPKFRLPIQKETWETWWTEYWQATWIPEWEFVNTPPLVKLWYQLETEPIVGAETFYVDGAANKETKKGKAGYVTDKGRQRVISLTETTNQKTELQAINLALQDSGSEVNIVTDSQYALGIIQAQPDKSESELVSQIIEQLIKKEKVYLSWVPAHKGIGGNEQVDKLVSSGIRKVLFLDGIDKAQEDHERYHSNWRAMASDFNLPPILAKEIVACCDKCQLKGEAMHGQVDCSPGIWQLDCTHLEGKIILVAVHVASGYIEAEVIPAETGQETAYFILKLAGRWPVKVIHTDNGSNFTSTAVKAACWWANVTQEFGIPYNPQSQGVVESMNKELKKIIGQVRDQAEHLKTAVQMAVFIHNFKRKGGIGGYSAGERIIDIIASDIQTKELQKQITKIQNFRVYYRDSRDPIWKGPAKLLWKGEGAVVIQDNSDIKVVPRRKAKIIRDYGKQMAGDDCVAGRQDED

SEQ ID NO: 941 - protein, 1007 aa, Artificial
  HIV Pol
FFRENLAFPQGEAREFSPEQARTEQARTLSPTCRELRVRGGNSPLPEAGAEGEGAISLSFPQITLWQRPLVTVKVGEQLIEALLDTGADDTVLEEINLPGRWKPKMIGGIGGFIKVRQYDQIPIEICGKRAIGTVLVGPTPVNIIGRNMLTQIGCTLNFPISPIETVPVKLKPGMDGPKVKQWPLTEEKIKALTEICTEMEKEGKISKIGPENPYNTPIFAIKKKDSTKWRKLVDFRELNKRTQDFWEVQLGIPHPAGLKKKKSVTVLDVGDAYFSVPLDKDFRKYTAFTIPSINNETPGIRYQYNVLPQGWKGSPAIFQSSMIKILEPFRQKNPEIVIYQYMDDLYVGSDLEIGQHREKVEELRAHLLKWGFTTPDKKHQKEPPFLWMGYELHPDKWTVQPIQLPDKDSWTVNDIQKLVGKLNWASQIYPGIKVKQLCKLLRGAKALTDIVPLTAEAELELAENREILKEPVHGVYYDPSKDLIAEIQKQGQGQWTYQIYQDTHKNLKTGKYARTKSAHTNDVRQLTEAVQKIALESIVIWGKTPKFRLPIHKETWETWWTEYWQATWIPEWEFVNTPPLVKLWYQLETEPIIGAETFYVDGAANRETKIGKAGYVTDRGRQKVVSLTETTNQKTELQAINLALQDSGSEVNIVTDSQYALGIIQAQPDRSESELVNQIIEQLINKEKVYLSWVPAHKGIGGNEQVDKLVSSGIRKVLFLDGIDKAQEEHERYHSNWRAMANDFNLPPIVAKEIVASCDKCQLKGEPMHGQVDCSPGIWQLDCTHLEGKIILVAVHVASGYIEAEVIPAETGQETAYFILKLAGRWPVKVIHTDNGSNFTSAAVKAACWWANVTQEFGIPYNPQSQGVVKSMNKELKKIIGQIRDQAEHLKTAVQMAVYIHNFKRKGGIGGYSAGERIIDIIASDIQTKELQKQITKIRNFRVYYRDSRDPIWKGPAKLLWKGEGAVVIQDNSEIKVVPRRKAKIIRDYGKQMAGDDCVAGRQDED

SEQ ID NO: 942 - protein, 1004 aa, Artificial
  HIV Pol
FFRENLAFQQRKARELSPEQTRANSPTSRELRVRRGDSPLPETGAEGEGEGAISFNLPQITLWQRPIVKIKVAGQLKEALLDTGADDTVLEEINLPGRWKPKMIGGIGGFIKVKQYEEIIIEIEGKKAIGTVLVGPTPVNIIGRNMLTQIGCTLNFPISPIDTVPVQLKAGMDGPKVKQWPLTEEKIKALTEICTEMEKEGKISKIGPENPYNTPVFAIKKKDSTKWRKLVDFRELNKRTQDFWEVQLGIPHPAGLKKKKSVTVLDVGDAYFSVPLDENFRKYTAFTIPSINNETPGVRYQYNVLPQGWKGSPAIFQSSMTKILEPFRTQNPEIVIYQYMDDLYVGSDLEIGQHREKVEELRKHLLRWGLTTPDKKHQKEPPFLWMGYELHPDKWTVQPIQLPDKECWTVNDIQKLVGKLNWASQIYPGIKVKQLCKLLRGTKALTDIVPLTAEAELELAENREILKEPVHGVYYDPSKDLIAEVQKQGLDQWTYQIYQEPFKNLKTGKYAKRRAAHTNDVRQLTEVIQKICLEAIVIWGKTPKFRLPIQRETWETWWTDYWQATWIPEWEFVNTPPLVKLWYQLEQGPILGAETFYVDGAANRETKIGKAGYVTDKGRQKVITLTETTNQKTELEAIHLALQDSGLEVNIVTDSQYALGIIQAQPDKSESELVSQIIEQLIKKEKVYLTWVPAHKGIGGNEQIDKLVSSGIRKVLFLDGIDKAQEDHDRYHSNWRTMASDFNLPPIVAKEIVASCDKCQLKGEAMHGQVDCSPGIWQLDCTHLEGKIIMVAVHVASGYIEAEVIPTETGQETAYFILKLAGRWPVKVIHTDNGSNFTSSTVKAACWWANIQQEFGIPYNPQSQGVVESMNKELKKIIGQIRDQAEHLKTAVQMAVFIHNFKRKGGIGGYSAGERIVDIIATDLQTKELQKQITKIQNFRVYYRDSRDPIWKGPAKLLWKGEGAVVIQDNSDIKVVPRRKAKIIRDYGKQMAGDDCVAGRQDED

SEQ ID NO: 943 - protein, 1002 aa, Artificial
  HIV Pol
FFRENLAFQQGEAREFPTEQARANSPTSRELRVRGGDNPLPETGAQGEGTISYNFPQITLWQRPVVPVKVAGQLKEALLDTGADDTVLEEMSLPGRWKPKMIGGIGGFIKVKQYEDITIEIEGKKAIGTVLIGPTPVNIIGRNMLTQIGCTLNFPISPVDTVPVKLKPGMDGPKVKQWPLTEEKIKALTEICTEMEKEGKISKIGPENPYNTPVFAIKKKDSTKWRKLVDFRELNKRTQDFWEIQLGIPHPAGLKKKKSVTVLDVGDAYFSVLLDESFRKYTAFTIPSLNNETPGIRYQYNVLPQGWKGSPAIFQSSMTKILEPFRTQNPEVVIYQYMDDLYVGSDLEIGQHREKVEELRKHLLKWGFTTPDKKHQKEPPFLWMGYELHPDKWTVQPIQLPDKESWTVNDIQKLVGKLNWASQIYAGIKVKQLCKLLRGAKALTDIVPLTAEAELELAENREILKEPVHGVYYDPSKDLIAEVQKQGLDQWTYQIYQEPFKNLKTGKYAKRRTAHTNDVRQLAEVVQKIALEGIVIWGKIPKFRLPIQKETWETWWTDYWQATWIPEWEFVNTPPLVKLWYQLEKEPIIGAETFYVDGAANRETKLGKAGYVTNKGRQKVITPIETTNQKTELEAIHLALKDSGLEVNIVTDSQYALGIIQAQPDKSESELVSQIIEQLIKKEKVYLSWVPAHKGIGGNEQVDKLVSSGIRKVLFLDGIDKAPEGHERYHSNWRAMASDFNLPPVIAKEIVANCDKCQLKGEAMHGQVDCSPRIWQLDCTHLEGKIILVAVHVASGYIEAEVIPAETGQETAYFILKLAGRWPVKVIHTDNGSNFTSNAVKAACWWAGIQQEFGIPYNPQSQGVVESMNKGLKEIIGQVREQAEHLKTAVQMAVFIHNFKGKGGIGGYSAGERIIDIIATDLQTKELQKQITKIQKFRVYYRDSRDPIWKGPAKLLWKGEGAIVIQDNSDIKVVPRRKAKIIRDYGKQMAGDDCVAGSQDED

SEQ ID NO: 944 - protein, 1003 aa, Artificial
  HIV Pol
FFRENLAFPQGKAGELSSEQTRANSPTSRLRVWGGDNPLPETGTEGQRQGTVSLSFPQITLWQRPVVTIKIGGQLKEALLDTGADDTVLEDINLPGKWKPKMIGGIGGFIKVRQYDHILIEICGHKAIGTVLVGPTPVNIIGRNLLTQIGCTLNFPISPIETVPVKLKPGMDGPKVKQWPLTEEKIKALTEICTDMEKEGKISRIGPENPYNTPIFAIKKKDSTKWRKLVDFRELNKRTQDFWEVQLGIPHPAGLKKKKSITVLDVGDAYFSIPLCEDFRKYTAFTIPSINNETPGIRYQYNVLPQGWKGSPAIFQSSMIKILEPFRKQNPEVVIYQYMDDLYVGSDLEIGQHRAKIEKLREHLLRWGLTTPDKKHQKEPPFLWMGYELHPDKWTVQSITLPEKESWTVNDIQKLVGKLNWASQIYPGIKVKQLCKLLRGTKALTEVIPLTEEAELELAENREILKEPMHGVYYDPSKDLIAELQKQGQGQWTYQIYQEPFKNLKTGKYARMRGAHTNDVKQLTEAVQKIAIESIVIWGKTPKFRLPIQKETWETWWIDYWQATWIPEWEFVNTPPLVKLWYQLEKEPIIGAETFYVDGAANKETKLGKAGYVTDRGRQKVVPFTDTTNQKTELQAINLALQDSGLEVNIVTDSQYALGIIQAQPDKSESELVSQIIEQLIKKEKVYLAWVPAHKGIGGNEQVDKLVSSGIRKVLFLDGIDKAQEEHEKYHSNWRAMASDFNLPPVVAKEIVASCDKCQLKGEAMHGQVDCSPGIWQLDCTHLEGKVILVAVHVASGYIEAEVIPAETGQEAAYFLLKLAGRWPVKVVHTDNGSNFTSATVKAACWWAGIKQEFGIPYNPQSQGVVESMNKELKKIIGQVRDQAEHLKTAVQMAVFIHNFKRKGGIGGYSAGERIIDIIASDIQTRELQKQITKIQNFRVYYRDSRDPIWKGPAKLLWKGEGAVVIQDNSDIKVVPRRKAKIIRDYGKQMAGDDCVASRQDED

SEQ ID NO: 945 - protein, 1002 aa, Artificial
  HIV Pol
FFRENLAFPQGKAGELSPKQTRANSPTSRELRVWGRDNPLSKTGAERQGTVSFNFPQITLWQRPLVAIKIGGQLKEALLDTGADDTVLEEMNLPGKWKPKMIGGIGGFIKVRQYDQIPIEICGQKAIGTVLVGPTPVNIIGRNLLTQIGCTLNFPISPIETVPVKLKPGMDGPKVKQWPLTEEKIKALTEICTDMEKEGKISRIGPENPYNTPIFAIKKKDSTKWRKLVDFRELNKRTQDFWEVQLGIPHPAGLKKKKSVTVLDVGDAYFSVPLDEDFRKYTAFTISSINNETPGIRYQYNVLPQGWKGSPAIFQSSMTKILEPFRKQNPEMVIYQYMDDLYVGSDLEIGQHRTKIEKLREHLLRWGFTRPDKKHQKEPPFLWMGYELHPDKWTVQSIKLPEKESWTVNDIQNLVERLNWASQIYPGIKVRQLCKLLRGTKALTEVIPLTEEAELELAENREILKEPVHGVYYDPSKDLIAEIQKQGHGQWTYQIYQEPFKNLKTGKYARMRGAHTNDVKQLAEAVQRISTESIVIWGRTPKFRLPIQKETWETWWAEYWQATWIPEWEFVNTPPLVKLWYQLEKEPIIGAETFYVDGAANRETKLGKAGYVTDRGRQKVVPLTDTTNQKTELQAINLALQDSGLEVNIVTDSQYALGIIQAQPDKSESELVNQIIEQLIKKEKVYLAWVPAHKGIGGNEQVDKLVSQGIRKVLFLDGIDKAQEEHEKYHNNWRAMASDFNLPPVVAKEIVASCDKCQLKGEAMHGQVDCSPGIWQLDCTHLEGKVILVAVHVASGYIEAEVIPAETGQETAYFLLKLAGRWPVKVVHTDNGSNFTSAAVKAACWWAGIKQEFGIPYNPQSQGVVESMNKELKKIIGQVRDQAEHLKTAVQMAVFIHNFKRRRGIGGYSAGERIIDIIATDIQTKELQKQIIKIQNFRVYYRDSRDPIWKGPAKLLWKGEGAVVIQDKSDIKVVPRRKVKIIRDYGKQMAGDDCVASRQDED

SEQ ID NO: 946 - protein, 1002 aa, Artificial
  HIV Pol
FFREDLAFPQGKAGEFSSEQTRANSPTSRELRVWGGDNPLSETGAERQGTVSFSFPQITLWQRPLVTIKIGGQLKEALLDTGADDTVLEEINLPGKWKPKMIGGIGGFIKVRQYDQILIEICGYKAMGTVLVGPTPVNIIGRNLLTQIGCTLNFPISPIETVPVKLKPGMDGPKVKQWPLTEEKIKALTEICTEMEKEGKISRIGPENPYNTPIFAIKKKDSTKWRKLVDFRELNKRTQDFWEVQLGIPHPAGLKKKKSVTVLDVGDAYFSVPLDEDFRKYTAFTIPSINNETPGIRYQYNVLPQGWKGSPAIFQSSMTKILEPFRKQNPEIVIYQYMDDLYVGSDLEIGQHRTKIEELREHLLRWGFTTPDKKHQKEPPFLWMGYELHPDKWTVQPINLPEKESWTVNDIQKLVGKLNWASQIYAGIKVKQLCKLLRGTKALTEVVPLTEEAELELAENREILKEPVHGVYYDPSKDLIAELQKQGDGQWTYQIYQEPFKNLKTGKYARTRGAHTNDVKQLTEAVQKIATESIVIWGKTPKFKLPIQKETWETWWIEYWQATWIPEWEFVNTPPLVKLWYQLEKEPIIGAETFYVDGAANRETKLGKAGYVTDRGRQKVVPFTDTTNQKTELQAINLALQDSGLEVNIVTDSQYALGIIQAQPDKSESELVSQIIEQLIKKEKVYLAWVPAHKGIGGNEQVDKLVSQGIRKVLFLDGIDKAQEEHEKYHNNWRAMASDFNLPPVVAKEIVASCDKCQLKGEAMHGQVDCSPGIWQLDCTHLEGKVILVAVHVASGYIEAEVIPAETGQETAYFLLKLAGRWPVKVVHTDNGSNFTSATVKAACWWAGIKQEFGIPYNPQSQGVVESMNKELKKIIGQVRDQAEHLKTAVQMAVFIHNFKRKGGIGGYSAGERIIDIIATDIQTRELQKQIIKIQNFRVYYRDSRDPIWKGPAKLLWKGEGAVVIQDNSDIKVVPRRKVKIIRDYGKQMAGDDCVASRQDED

SEQ ID NO: 947 - protein, 1004 aa, Artificial
  HIV Pol
FFRENLAFPQWKAREFPSEQTPSRANSPTSRDLRIRGGDNTSSETGAERQGTVSFNLPQITLWQRPVVTVKIGGQLKEALLDTGADDTVLEEINLPGKWKPKMIGGIGGFIKVRQYDQIPLEICGHKAIGTVLVGPTPVNIIGRNLLTQIGCTLNFPISPIETVPVKLKPGMDGPKVKQWPLTEEKIKALIEICSELEKEGKISKIGPENPYNTPIFAIKKKDSTKWRKLVDFRELNKRTQDFWEVQLGIPHPAGLKKKKSVTVLDVGDAYFSVPLHEDFRKYTAFTIPSTNNETPGIRYQYNVLPQGWKGSPAIFQSSMTKILEPFRKQNPEMIIYQYMDDLYVGSDLEIGQHRIKIEELRGHLLKWGFTTPDKKYQKEPPFLWMGYELHPDKWTVQPIHLPEKESWTVNDIQKLVGKLNWASQIYPGIKVRQLCKCLRGAKALTEVIPLTAEAELELAENREILKEPVHGAYYDPSKDLIAEIQKQGQDQWTYQIYQEQYKNLKTGKYAKMRGTHTNDVKQLTEAVQKIAQECIVIWGKTPKFRLPIQKETWETWWTEYWQATWIPEWEYVNTPPLVKLWYQLEKEPIVGAETFYVDGAANRETKIGKAGYVTDRGRQKVVSLTDTTNQKTELQAINLALQDSGLEVNIVTDSQYALGIIQAQPDKSESEVVSQIIEQLIKKEKVYLSWVPAHKGIGGNEQVDKLVSNGIRKILFLDGIDKAQEEHEKYHNNWRAMASEFNLPPVVAKEIVASCDKCQVKGEALHGQVDCSPGIWQLDCTHLEGKGILVAVHVASGYIEAEVIPAETGQETAYFLLKLAGRWPVKVVHTDNGSNFTSAAVKAACWWAGIKQEFGIPYNPQSQGVVESMNKELKKIIGQVREQAEHLKTAVQMAVFIHNFKRKGGIGGYSAGERIIDIIATDIQTKELQKQIIKIQNFRVYYRDSRDPVWKGPAKLLWKGEGAVVIQDNSEIKVVPRRKAKIIRDYGKQMAGDDCVASRQDED

SEQ ID NO: 948 - protein, 1004 aa, Artificial
  HIV Pol
FFRENLAFQQGEARKFPSEQTRANSPTSRELRVQRGDNPLSEAGAERRGTVPSLSFPQITLWQRPLVTIKIGGQIKEALLDTGADDTVLEDINLPGKWKPKMIGGIGGFIKVKQYDNILIEICGHKAIGTVLVGPTPVNIIGRNMLTQIGCTLNFPVSPIETVPVKLKPGMDGPKVKQWPLTEEKIKALTEICLEMEKEGKISKIGPENPYNTPVFAIKKKDSSKWRKLVDFKELNKRTQDFWEVQLGIPHPAGLKKKKSVTVLDVGDAYFSVPLDKDFKKYTAFTIPSVNNETPGIRYQYNVLPQGWKGSPAIFQCSMTKILEPFRMKNPDIVIYQYMDDLYVGSDLEIGQHRTKIEELREHLLRWGFTTPDKKHQKEPPFLWMGHELHPDKWTVQPIQLPNKDSWTVNDIQKLVGKLNWASQIYPGIKVRPLCKLLRGAKALTDIVPLTAEAELELAKNREILREPVHGVYYDPSKDLIAEIQKQGDGQWTYQIYQNPFKNLKTGKYAKVRSAHTNDVKQLTEAVQKIALESIVIWGKRSPKFKLPILKETWDTWWTDYWQATWIPEWEFVNTPPLVKLWYQLETEPIAGADTFYVDGASNRETKKGKAGYVTDKGKQKVVSLTETTNQKAELQAIYLALQDSGSEVNIVTDSQYALGIIQAQPDKSESEIVNQIIEQLIQKERVYLSWVPAHKGIGGNEQVDKLVSAGVRKILFLDGIDKAQEEHEKYHNNWRAMASDFNLPPIVAKEIVASCDKCQLKGEAMHGQVDCSPGIWQLDCTHLEGKVILVAVHVASEYIEAEVIPAETGQETAYFILKLAGRWPVKIIHTDNGSNFTSAAVKASCWWAGIQQEFGIPYNPQSQGVVESINKELKKIIGQVRDQAEHLKTAVQMAVFIHNFKRKGGIGGYSAGERIIDIISTDIQTRELQKQITKIQNFRVYYRDSRNPVWKGPAKLLWKGEGAVVIQDNSEIKIVPRRKAKIIRDYGKQMAVDDCVAGRQDED

SEQ ID NO: 949 - protein, 1003 aa, Artificial
  HIV Pol
FFRENLAFQQGEARKLHPEQARAVSPASRELQVRGGDNPISEAGAERRGTVPSLSFPQITLWQRPLVTIRVGGQLKEALLDTGADDTVLEDVNLPGKWKPKMIGGIGGFIKVKQYDSILIEICGHRAIGTVLVGPTPVNIIGRNMLTQIGCTLHFPISPIETVPVKLKPGMDGPKVKQWPLTEEKIKALTEICMEMEKEGKISKIGPENPYNTPVFAIKKKDSTKWRKLVDFRELNKRTQDFWEVQLGIPHPAGLKKKKSVTVLDVGDAYFSVPLDKDFRKYTASTIPSTNNETPGVRYQYNVLPQGWKGSPAIFQYSMTKILDPFRAKNPDIVIYQYMDDLYVGSDLEIGQHRTKIEELREHLLKWGLTTPDKKHQKEPPFLWMGYELHPDKWTVQPIQLPDKDSWTVNDIQKLVGKLNWASQIYPGIKVKQLCKLLRGAKALTDIVPLTTEAELELAENREILKEPVHGAYYDPSKDLIAEIQKQGQGQWTYQIYQEPFKNLKTGKYAKMRSAHTNDVKQLTEAVQKISLESIVIWGKTPKFRLPILKETWDTWWTEYWQATWIPEWEFVNTPPLVKLWYQLETEPIVGAETFYVDGASNRETKKGKAGYVTDRGRQKAVSLTETTNQKAELQAIQLALQDSGSEVNIVTDSQYALGIIQAQPDKSESELVNQIIEQLIKKEKVYLSWVPAHKGIGGNEQVDKLVSAGIRKVLFLDGIDKAQEEHEKYHNNWRAMASDFNIPAVVAKEIVASCDKCQLKGEAMHGQVDCSPGIWQLDCTHLEGKIILVAVHVASGYLEAEVIPAETGQETAYFLLKLAGRWPVKTIHTDNGTNFTSATVKAACWWAGIQQEFGIPYNPQSQGVVESMNKELKKIIGQIRDQAEHLKTAVQMAVFIHNFKRKGGIGGYSAGERTIDIIATDIQTRELQKQIIKIQNFRVYYRDSRDPVWKGPAKLLWKGEGAVVIQDNSEIKVVPRRKAKIIRDYGKQMAGDDCVAGRQDED

SEQ ID NO: 950 - protein, 1002 aa, Artificial
  HIV Pol
  misc_feature (423)..(423): Xaa can be any naturally occurring amino acid
FFRENLAFQQGEARKFPSETRANSPASREPRDQRRGNSLSEAGAERRGTVPSLSFPQITLWQRPLVTIKIGGQLKEALLDTGADDTVLEDINLPGKWKPKMIGGIGGFIKVKQYDHILIEICGHKAIGTVLVGPTPVNIVGRNMLTQIGCTLNFPISPIETVPVKLKPGMDGPKVKQWPLTEEKIKALTEICTDMEKEGKISRIGPENPYNTPVFAIKKKDSTKWRKLVDFRELNKRTQDFWEVQLGIPHPAGLKKKKSVTVLDVGDAYFSVPLDKDFRKYTAFTIPSVNNETPGIRYQYNVLPQGWKGSPAIFQCSMTKILEPFRTRNPDIVIYQYMDDLYVGSDLEIGQHRTKIEELREHLLKWGFTTPDKKHQKEPPFLWMGYELHPDKWTVQPIQLPDKDSWTVDDIQKLVGKLNWASXIYPGIKVRQLCKLLRGAKALTDMVPLTAEANLELAENREILKEPVHGVYYDPSKDLIPKLQKQGQGQWTYQIYREPFKNLKTGKYAKMRSAHTNDVKQLTEAVQKIALESIVIWGKTPKFKLPILKETWDTWWTEYWQATWIPEWEFVNTPPLVKLWYQLETEPIAGAETFYVDGASNRETKKGKAGYVTDRGRQKVVSLTETTNQKAELQAIHLALQDSGSEVNIVTDSQYALGIIQAQPDKSESELVNQIIEQLIQKEKIYLSWVPAHKGIGGNEQVDKLVSAGIRKILFLDGIDKAQEEHEKYHNNWRAMASDFNLPPVVAKEIVASCDKCQLKGEAMHGQVDCSPGIWQLDCTHLEGKIILVAVHVASGYIEAEVIPAETGQDTAYFILKLAGRWPVKMIHTDNGSNFTSAAVKAACWWAGIQQEFGIPYNPQSQGVVESMNKELKKIIGQVRDQAEHLKTAVQMAVFIHNFKRKGGIGGYSAGERIIDIIATDIQTKELQKQVTKIQNFRVYYRDSRDPVWKGPAKLLWKGEGAVVIQDNSEIKVVPRRKAKIIRDYGKQMAGDDCVAGRQDED

SEQ ID NO: 951 - protein, 1005 aa, Artificial
  HIV Pol
FFRENLAFQQGEARKFSSEQARANSPASGELRVQRGNNPLSEAGAEGRGTGTVSSLSLPQITFWQRPLVTIRVGGQLREALLDTGADDTVLEDIDLPGKWKPKIIGGIGGFIKVKQYDQITIDICGHKAIGTVLVGPTPVNIIGRNMLTQIGCTLNFPISPIETVPVKLKPGMDGPKVKQWPLTEEKIKALTEICTDMEKEGKISKIGPENPYNTPIFAIKKKDSTKWRKLVDFRELNKRTQDFWEVQLGIPHPAGLKKKKSVTVLDVGDAYFSVPLDKEFRKYTAFTIPSLNNETPGIRYQYNVLPQGWKGSPAIFQSSMTKILEPFRAKNPDIVIYQYMDDLYVGSDLELGQHRMKIEELREHLLKWGFTTPDKKHQKEPPFLWMGYELHPDKWTVQPIQLPEKDSWTVNDIQKLVGKLNWASQIYPGIKIKQLCKLLRGAKALTDIVPLTEEAELELAENREILKEPVHGVYYDPSKDLIAELQKQGQGQWTYQIYQEPFKNLKTGKYAKTRSAHTNDIKELTDAVQKVARECIVIWGKSPKFRLPIQKETWEAWWTDYWQATWIPEWEFVNTPPLVKLWYQLETEPIIGAETFYVDGASNRETKKGKAGYVTDRGRQKAVILTETTNQKAELQAIHLALQDSGSEVNIVTDSQYVLGIIQAQPDKSESEIVNKIIEKLIQKERVYLSWVPAHKGIGGNEQVDRLVSAGIRKILFLDGIDKAQEEHEKYHNNWRAMASDFNLPPVVAKEIVASCDKCQLKGEAMHGQVDCSPGIWQLDCTHLEGKIILVAVHVASGYIEAEVIPAETGQETAYFILKLAGRWPVKIIHTDNGSNFTSSAVKAACWWAGIQQEFGIPYNPQSQGVVESMNKELKKIIGQVRDQAEHLKTAVQMAVFIHNFKRKGGIGGYSAGERIIDIISTDIQTRELQKQIIKIQNFRVYYRDSRDPVWKGPAKLLWKGEGAVVIQDNSEIKVVPRRKAKIIRDYGKQMAGDDCVAGRQDED

SEQ ID NO: 952 - protein, 1003 aa, Artificial
  HIV Pol
FFRENVAFQQGEARKFSSEQTRANSPASRELRVRGGDSSLPEAGAERQGTGSSLDFPQITLWQRPVVTIKVGGQLREALLDTGADDTVLEDINLPGKWKPKMIGGIGGFIKVRQYDQVSIEICGQKAIGTVLVGPTPVNIIGRNMLTQIGCTLNFPISPIETVPVKLKPGMDGPKVKQWPLTEEKIKALTEICTEMEKEGKISKIGPENPYNTPVFAIKKKDSTKWRKLVDFRELNKRTQDFWEVQLGIPHPAGLKKKRSVTVLDVGDAYFSVPLDKEFRKYTAFTIPSINNETPGIRYQYNVLPQGWKGSPAIFQSSMIKILEPFRKENPEIVIYQYMDDLYVGSDLEIGQHRAKIEELREHLLRWGFTTPDKKHQKEPPFLWMGYELHPDKWTVQAIQLPDKSSWTVNDIQKLVGKLNWASQIYPGIRVKHLCKLLRGTKALTDVVPLTAEAELELAENREILKEPVHGVYYDPSKDLIAEIQKQGHDQWTYQIYQEPHKNLKTGKYARRKSAHTNDVKQLTEVVQKVATEGIVIWGKVPKFRLPIQKETWEIWWTEYWQATWIPEWEFVNTPPLVKLWYQLETEPIIGAETFYVDGAANRETKLGKAGYITDRGRQKVVSLTETTNQKTELQAIQLALQDSGSEVNIVTDSQYALGIIQAHPDKSESEIVNQIIEQLIQKERVYLSWVPAHKGIGGNEQVDKLVSTGIRKVLFLDGIDKAQEEHEKYHSNWRAMASDFNLPPVVAKEIVASCDKCQLKGEAMHGQVDCSPGIWQLDCTHLEGKIILVAVHVASGYIEAEVIPAETGQEAAYFILKLAGRWPVKIIHTDNGSNFTSAVVKAACWWAGIQQEFGIPYNPQSQGVVESMNKELKKIIGQVRDQAEHLKTAVQMAVFIHNFKRKGGIGGYSAGERIIDIIATDIQTKELQKQISKIQNFRVYFRDSRDPVWKGPAKLLWKGEGAVVIQDNNEIKVIPRRKAKIIRDYGKQMAGDDCVAGRQDED

SEQ ID NO: 953 - protein, 1003 aa, Artificial
  HIV Pol
FFRENLAFQQREAGKFSSEQTRANSPTSRELRVWGGDKPLSEAGDERQGTGASFNLPQITLWQRPIVTIKIGGQLREALLDTGADDTVLEDINLPGKWKPKMIGGIGGFIKVRQYDQVVMEICGQKAIGTVLVGPTPVNIIGRNMLTQIGCTLNFPISPIETVPVKLKPGMDGPKVKQWPLTEEKIKALTEICLEMEKEGKISKIGPENPYNTPIFAIKKKNSNRWRKLVDFRELNKRTQDFWEVQLGIPHPAGLKKKKSVTVLDVGDAYFSVPLDPEFRKYTAFTIPSVNNETPGVRYQYNVLPQGWKGSPAIFQYSMTKILEPFRTKNPEMVIYQYMDDLYVGSDLEIGQHRTKIEELREHLLRWGFFTPDEKHQKEPPFLWMGYELHPDKWTVQPIQLPDKEDWTVNDIQKLVGKLNRASQIYPGIKVKQLCKLIRGAKTLTDIVPLTAEAELELAENREILKEPVHGVYYDPSKDLIAEIQKQGQGQWTYQIYQEPYKNLKTGKYARMRSAHTNDVKQLTEAVQKIATEGIVIWGKTPKFRLPIQKETWETWWTEYWQATWIPEWEFVNTPPLVKLWYQLETDPIAGAETFYVDGAANRETKKGRAGYVTDKGRQKVVSLTETTNQKTELQTIYLALQDSGSEVNIVTDSQYAIGIIQAQPDKSESELVNQIIEQLIQKDQIYLSWVPAHKGIGGNEQVDKLVSSGIRKVLFLDGIDKAQEEHEKYHNNWRAMASDFNLPPIVAKEIVASCDKCQLKGEAMHGQVDCSPGIWQLDCTHLEGKIILVAVHVASGYIEAEVIPAETGQETAFFILKLAGRWPVKIIHTDNGSNFISATVKAACWWAGIQQEFGISYNPQSQGVVESMNKELKKIIGQIRDQAEHLKTAVQMAVFIHNFKRKGGIGGYSAGERIVDIIASDIQTRALQKQITKIQNFRVYYRDSRDPIWKGPAKLLWKGEGAVVIQDNSEIKVVPRRKAKIIRDYGKQMAGDDCVAGRQDED

SEQ ID NO: 954 - protein, 999 aa, Artificial
  HIV Pol
FFRENLAFQQGEAREFPSEQARANSPTRRELRVRGGDSPLPEAGAEGKGTISSIFPQITLWQRPIVKVRIGGQLIEALLDTGADDTVLEEIDLPGKWKPKMIGGIGGFIKVRQYDQILIEISGKRAIGTVLVGPTPINIIGRNMLTQIGCTLNFPISPIETVPVKLKPGMDGPRVKQWPLTEEKIKALTEICNEMEKEGKISKIGPENPYNTPIFAIKKKDSTRWRKLVDFRELNKRTQDFWEVPLGIPHPGGLKQKRSVTVLDVGDAYFSVPLDENFRKYTAFTIPSTNNETPGIRYQYPQGWKGSPAIFQSSMTKILEPFRTQNPEIVIYQYMDDLYVGSDLEIGQHRAKIEELREHLLRWGFTTPDKKHQKEPPFLWMGYELHPDKWTVQPIQLPNKENWTVNDIQKLVGKLNWASQIYPGIKVKQLCKLIRGAKALTDIVSMTAEAEMELAENREILKEPVHGVYYDPSKDLIAEVQKQGLGQWTYQVYQEPYKNLKTGKYAKGGSAHTNDVKQLTEVVQKIATEGIIIWGKIPKFKLPIKKETWEVWWTEYWQATWIPEWEFVNTPPLVKLWYQLETEPIPGVETYYVDGAANRETKLGKAGYVTDKGRQIIITLTETTNQKAELHAIQLALQDSQSEVNIVTDSQYALGIIQAQPDRSESEIVNQIIEQLIKKEKVYLSWVPAHKGIGGNEQVDKLVSSGIRKVLFLDGIDKAQEEHERYHSNWKAMASDFNLPPIVAKEIVASCDKCQLKGEAMHGQVDCSPGIWQLDCTHLEGKIILVAVHVASGYIEAEVIPAETGQETAYFILKLAGRWPVKIIHTDNGSNFTSAAVKAACWWASITQEFGIPYNPQSQGVVESMNKELKKIIGQVRDQAEHLKTAVQMAVFIHNFKRKGGIGGYSAGERIIDIIASDIQTKELQKQITKIQNFRVYYRDSRDPIWKGPAKLLWKGEGAVVIQDNNEIKVVPRRKAKIIRDYGKQMAGDDCVAGRQDED

SEQ ID NO: 955 - protein, 1002 aa, Artificial
  HIV Pol
FFRENLAFQQGEARKLSPEQDRANSPTSRELRIRRGDSPLPEAGAKGEGAISLNFPQITLWQRPLVTVKIGGQLIEALLDTGADDTVLEGINLPGKWKPKMIGGIGGFIKVRQYDQILIEIGGKKAIGTVLVGPTPINIIGRNMLTQIGCTLNFPISPIETVPVKLKPGMDGPRVKQWPLTEEKIKALTEICKDMEKEGKISKIGPENPYNTPIFAIKKKDSTKWRKLVDFRELNKRTQDFWEVQLGIPHPAGLKKKRSVTVLDVGDAYFSVPLDKDFRKYTAFTIPSINNETPGIRYQYNVLPQGWKGSPAIFQSSMTKILEPSRTKNPEMVIYQYMDDLYVGSDLEIGQHRAKIEELREHLLKWGLTTPDKKHQKEPPFLWMGYELHPDKWTVQPIQLPEKEDWTVNDIQKLVGKLNWASQIYPGIKVKHLCRLLRGAKALTDIVPLTAEAEMELAENREILKEPVHGVYHDPSKELIAEVQKQGPDQWTYQIYQEPYKNLKTGKYAKRGSAHTNDVKQLTEVVQKIATEGIVIWGKIPKFKLPIRKETWEVWWTEYWQAAWIPEWEFVNTPPLVKLWYQLETEPIPGAETYYVDGAANRETKLGKAGHVTDKGKQKIITLTETTNQKAELHAIQLALQDSRPEVNIVTDSQYALGIIQAQPDRSGSELVNQIIEQLIKKEKVYLSWVPAHKGIGGNEQVDKLVSSGIRKVLFLDGIDKAQEEHERYHSNWRAMASDFNLPPVVAKEIVASCDKCQLKGEAMHGQVDCSPGIWQLDCTHLEGKIIIVAVHVASGYIEAEVIPAETGQETAYFILKLAGRWPVKVIHTDNGPNFISAAVKAACWWANITQEFGIPYNPQSQGVVESMNKELKKIIGQVGDQAEHLKTAVQMAVFIHNFKRKGGIGGYSAGERIIDIIASDIQTKELQKQIIKIQNFRVYYRDSRDPIWKGPAKLLWKGEGAVVIQDNNEIKVVPRRKAKILKDYGKQMAGGDCVAGRQDED

SEQ ID NO: 956 - protein, 1000 aa, Artificial
  HIV Pol
FFRENLAFQQGEAREFSSEQDRTNSPTCRKPRVRRGDSPLPEAGDEGKGAISLPQITLWQRPLVTVKIGGQLIEALLDTGADDTVLEEINLPGRWKPKMIGGIGGFIKVRQYDQVPIEISGKKAIGTILVGPTPINIIGRNMLTQIGCTLNFPISPIETVPVKLKPGMDGPRVKQWPLTEEKIKALTEICKEMEEEGKISKIGPENPYNTPIFAIKKKDSTKWRKLVDFRELNKRTQDFWEVQLGIPHPAGLKKKKSVTVLDVGDAYFSVPLDEDFRKYTAFTIPSINNETPGVRYQYNVLPQGWKGSPAIFQSSMTRILEPFRANNPEMVIYQYMDDLYVGSDLEIGQHRAKIEELREHLLKWGFTTPDKKHQKEPPFLWMGYELHPDKWTVQPIQLPDKESWTVNDIQKLVGKLNWASQIYPGIKVTHLCKLLRGAKALTDIVSLTAEAEMELAENREILREPVHGVYYDPSKELIAEVQKQGLDQWTYQIYQEPYKNLKTGKYAKRGSAHTNDVKQLTEVVQKIATESIVIWGKTPKFKLPIRKETWEIWWTDYWQATWIPEWEFVNTPPLVKLWYRLETEPIPGAETYYVDGAANRETKLGKAGYVTDKGKQKIITLTETTNQKAELQAIQLALQDSRSEVNIVTDSQYALGIIQAQPDRSEAELVNQIIEQLIKKEKVYLSWVPAHKGIGGNEQVDKLVSSGIRKVLFLDGIDKAQEEHERYHNNWRAMASDFNLPPIVAKEIVASCDKCQLKGEAMHGQVDCSPGIWQLDCTHLEGKIIIVAVHVASGYIEAEVIPAETGQETAYFILKLAGRWPVTVIHTDNGSNFTSAAVKAACWWANITQEFGIPYNPQSQGVVESMNKELKKIIGQVRDQAEHLKTAVQMAVFIHNFKRKGGIGGYSAGERIIDIIASDIQTKELQKQITKIQNFRVYYRDSRDPVWKGPAKLLWKGEGAVVIQDNNEIKVVPRRKAKIIRDYGKQMAGDDCVAGRQDED

SEQ ID NO: 957 - protein, 1001 aa, Artificial
  HIV Pol
  misc_feature (434)..(434): Xaa can be any naturally occurring amino acid
FFRENLAFQQGKAREFPPEEARANSPTSRELRVRRGDHPLSEAGAERTGTSFNFPQITLWQRPIVTVKIEGQLKEALLDTGADDTVLEDINLPGKWKPKMIGGIGGFIKVRQYEQVAIEIFGKKAIGTVLVGPTPVNIIGRNILTQMGCTLNLPISPIETVPVTLKPGMDGPKVKQWPLTEEKIKALTEICLEMEKEGKISKIGPENPYNTPIFAIKKKNSTRWRKLVDFRELNKRTQDFWEVQLGIPHPAGLKKKKSVSVLDVGGAYFSVPLHEDFRKYTAFTIPSTNNETPGIRYQYNVLPQGWKGSPAIFQSSMTKILEPFRKQNPEVIIYQYMDDLYVGSDLEIGQHREKIEELRAHLLRWGFTTPDQKHQKEPPFLWMGYELHPDKWTVQPVKLPEKDSWTVNDIQKLVGKLNWASQIYPGIKVKQLCXLLRGAKALTEIVPLTKEAELELAENREILKEPVHGAYYDPSKELIAEIQKQGPDQWTYQIYQEPFKNLKTGKYAKMRSAHTNDVKQLTEVVQKIATESIVIWGKIPKFRLPIQKETWETWWTEHWQATWIPEWEFVNTPHLVKLWYQLETEPIEGAETYYVDGAANRETKMGKAGYVTDRGKQKIVSLTETTNQKTELQAIYLALQESGPEVNIVTDSQYALGIIQAQPDKSESELVNQIIEELIKKEKFYLSWVPAHKGIGGNEQVDKLVSSGIRKVLFLDGIDKAQVQHEKYHSNWRAMASDFNLPPIVAKEIVASCDKCQLKGEAMHGQVDCSPGIWQLDCTHLEGKIILVAVHVASGYIEAEVIPAETGQETAYFILKLAGRWPVKMIHTDNGSNFTSAAVKAACWWADIHQEFGIPYNPQSQGVVESMNKELKKIIGQVRDQAEHLRTAVQMAVFIHNFKRKGGIGGYSARERIIDIIATDIPTKELQKQISQIQKFRVYYRDSRDPIWKGPAKLLWKGEGAVVIQDNSEIKVVPRRKAKIIRDYGKQMAGDDCVAGRQDED

SEQ ID NO: 958 - protein, 1000 aa, Artificial
  HIV Pol
  misc_feature (797)..(797): Xaa can be any naturally occurring amino acid
FFRENLAFQQREARKFSPEQARANSPTSRELRVRGGDDLLPEAGAEGQGTSLCFPQITLWQRPLVTVKIEGQLREALLDTGADDTVLEEINLLGRWKPKMIGGIGGFIKVRQYDQVAIEICGKKAIGTVLVGPTPVNIIGRNILTQIGCTLNFPISPIETVPVKLKPGMDGPRVKQWPLTEEKIKALTEICMEMEKEGKISKIGPENPYNTPIFAIKKKDSTKWRKLVDFRELNKRTQDFWEVQLGIPHPAGLKKKKSVSVLDVGDAYFSVPLDKDFRKYTAFTIPSINNETPGIRYQYNVLPQGWKGSPAIFQSSMTKILEPFRKQNPEIIIYQYMDDLYVGSDLEIGQHRAKIEELRAHLLRWGFTTPDKKHQKEPPFLWMGYELHPDKWTVQPVKLPEKDSWTVNDIQKLVGKLNWASQIYPGIKVRQLCKLLRGAKALTDVVPLTKEAELELAENREILREPVHGVYYDPSKDLIAEIQKQGPDQWTYQIYQEPFKNLKTGKYAKMRNAHTSDVKQLTEAVQKIATESIVIWGKIPKFKLPIQKETWETWWTEHWQATWIPEEFVNTPHLVKLWYQLEAEPIAGAETYYVDGAANRETKIGKAGYVTDKGKQKVVALTETTNQKTELQAIYLALQDSGLEVNIVTDSQYALGIIQAQPDKSESELVNQIIEELIKKEKVYLSWVPAHKGIGGNEQVDKLVSSGIRKVLFLDGIDKAQEAHERYHNNWRAMASEFNLPPIVAKEIVASCDKCQLKGEAMHGQVDCSPGIWQLDCTHLEGKVILVAVHVASGYIXPEVIPAETGQETAYFILKLAGRWPVKMIHTDNGTNFTSTAVKAACWWADIQQDFGIPYNPQSQGVVESMNKELKKIIGQVRDQAEHLRTAVQMAVFIHNFKRKGGIGGYSAGERIIDIIATDIQTKELQKQISNIQKFRVYYRDSRDPIWKGPAKLLWKGEGAVVIQDNSEIKVVPRRKAKIIRDYGKQMAGDDCVAGRQDED

SEQ ID NO: 959 - protein, 1002 aa, Artificial
  HIV Pol
FFRENLAFQQREARKFSPEQARTNSPTSRELRVRRGDDPLSEAGAAEGQGTSLSFPQITLWQRPLVTVKIEGQLREALLDTGADDTVLEEINLPGKWKPKMIGGIGGFIKVRQYEQVAIEICGKKAIGTVLVGPTPVNIIGRNILTQIGCTLNFPISPIETVPVKLKPGMDGPKVKQWPLTEEKIKALTEICTEMEKEGKISRIGPENPYSTPIFAIKKKDSTKWRKLVDFRELNKRTQDFWEVQLGIPHPAGLKKKKSVSVLDVGDAYFSVPLDKEFRKYTAFTIPSINNETPGIRYQYNVLPQGWKGSPAIFQSSMTKILAPFREQNPEMVIYQYMDDLYVGSDLEIGQHRAKIEELRAHLLKWGFTTPDKKHQKEPPFLWMGYELHPDKWTVQTVKLPEKDSWTVNDIQKLVGKLNWASQIYPNIKVKQLCKLLRGAKALTDIIPLTKEAELELAENREILREPIHGVYYDPSKDLIAEIRKQGQGQWTYQIYQEPFKNLKTGKYAKMRTAHTNDIKQLTEAVQKISTESIVIWGKIPKFRLPIQKETWETWWTEYWQATWIPEWEFVNTPHLVKLWYQLETEPIAGAETYYIDGAANRETKLGKAGYVTDRGKQKVVSLTETTNQKTELQAIYLALQDSGLEVNIVTDSQYALGIIQAQPDKSESELVNQIIEELIKKEKVYLSWVPAHKGIGGNEQVDKLVSSGVRKVLFLDGIDKAQEEHERYHNNWRAVASDFNLPPIVAKEIVASCDKCQLKGEAMHGQVDCSPGIWQLDCTHLEGQVILVAVHVASGYIEAEVIPAETGKETAYFLLKLASRWPVKVIHTDNGSNFTSAAVKAACWWADIQQEFGIPYNPQSQGVVESMNKELKKIIGQVRDQAEHLKTAVQMAVFIHNFKRKGGIGGYSAGERIIDIIATDIQTKELQKQISNIQKFRVYYRDSRDPIWKGPAKLLWKGEGAVVIQDNSEIKVVPRREAKIIRDYGKQMAGDDCVASRQDED

SEQ ID NO: 960 - protein, 1001 aa, Artificial
  HIV Pol
FFREDLAFQQREAREFSPEQTRANSPTSREPRVRRGDPLPETGAEGQGTVSSNFPQITLWQRPLVTIRIGGQLREALLDTGADDTVLEEIDLPGKWKPKMIGGIGGFIKVRQYNEVPIEIEGKKAIGTVLIGPTPVNIIGRNMLTQLGCTLNFPISPIETVPVKLKPGMDGPKIKQWPLTEEKIKALTQICAELEEEGKISRIGPENPYNTPVFAIKKKDSTKWRKLVDFRELNKRTQDFWEVQLGIPHPAGLKKKKSVTVLDVGDAYFSVPLYEDFRKYTAFTIPSINNETPGIRYQYNVLPQGWKGSPAIFQCSMTKILKPFRERNPEIVIYQYMDDLYVGSDLEIEQHRRKIKELREHLLKWGFYTPDKKHQKEPPFLWMGYELHPDKWTVQPIQLPEKEDWTVNDIQKLVGKLNWASQIYPGIKIKELCKLIRGAKALTDIVPLTREAELELAENKEILKEPVHGVYYDPARELIAEVQKQGLDQWTYQIYQEPFKNLKTGKYAKRRSAHTNDVKQLSQVVQKIALEAIVIWGKTPKFRLPIQKETWETWWTDYWQATWIPEWEFVNTPPLVKLWYQLEKEPIMGAETFYVDGASNRETKVGKAGYVTDKGRQKVITLTDTTNQKTELQAIYLALQDSGIEVNIVTDSQYALGIIQAQPDKSESELVNQIIEELIKKEKVYLSWVPAHKGIGGNEQVDKLVSSGIRKVLFLDGIDKAQEEHEKYHSNWRAMASDFNLPPVVAKEIVASCDKCQLKGEAMHGQVDCSPGIWQLDCTHLEGKVILVAVHVASGYIEAEVIPAETGQEAAFFILKLAGGWPVKAIHTDNGSNFTSGAVKAACWWADIKQEFGIPYNPQSQGVVESMNKELKKIIGQVREQAEHLKTAVQMAVFIHNFKRKGGIGGYSAGERIIDIIATDIQTKELQKQITKIQNFRVYYRDSRDPIWKGPAKLLWKGEGAVVIQDNSEIKVVPRRKAKIIRDYGKQMAGDDCVAGRQDED

SEQ ID NO: 961 - protein, 1001 aa, Artificial
  HIV Pol
FFREDLAFQQREARELSPEQTRANSPTSREPRARRGDPLPETGAEGQGTVSSNFPQITLWQRPLVTIRIGGQLREALLDTGADDTVLEDIDLPRKWKPKMIGGIGGFIKVRQYNEVPIEIEGKKAIGTVLIGPTPVNIIGRNMLTQLGCTLNFPISPIETVPVKLKPGMDGPKIKQWPLTEEKIKALTQICAEMEEEGKISRVGPENPYNTPVFAIKKKDSTKWRKLVDFRELNKRTQDFWEVQLGIPHPAGLKKKKSVTVLDVGDAYFSVPLYEDFRKYTAFTIPSINNETPGIRYQYNVLPQGWKGSPAIFQCSMTKILKPFRERNPEIVIYQYMDDLYVGSDLEIEQHRRKIKELREHLLKWGFTTPDKKHQKEPPFLWMGYELHPDKWTVQPIQLPEKEDWTVNDIQKLVGKLNWASQIYPGIKVKQLCKLLKGAKALTDIVPLTREAELELAENKEILKEPVHGVYYDSAKELIAEVQKQGLDQWTYQIYQEPFKNLKTGKYAKRRSAHTNDVKQLAEVVQKIALEAIVIWGKTPKFRLPIQRETWETWWTDYWQATWIPEWEFVNTPPLVKLWYQLEKEPIMGAETFYVDGASNRETKTGKAGYVTDKGRQKVVTLTDTTNQKTELHAIYLALRDSGLEVNIVTDSQYALGIIQAQPDKSESELVNQIIEELIKKEKVYLSWVPAHKGIGGNEQVDKLVSSGIRKVLFLDGIDKAQEDHEKYHSNWRAMASDFNLPPVVAKEIVASCDKCQLKGEAMHGQVDCSPGIWQLDCTHLEGKVILVAVHVASGYIEAEVIPAETGQEAAFFILKLAGRWPVKVIHTDNGSNFTSGAVKAACWWADIKQEFGIPYNPQSQGVVESMNKELKKIIGQVREQAEHLKTAVQMAVFIHNFKRKGGIGGYSAGERIIDIIATDIQTRELQKQITKIQNFRVYYRDSRDPIWKGPAKLPWKGEGAVVIQDNSEIKVVPRRKAKIIRDYGKQMAGDDCVAGRQDED

SEQ ID NO: 962 - protein, 1001 aa, Artificial
  HIV Pol
FFREVLASQQREARKFSSEQTRANSPTSRELWVRGEDNPLSETGNERSGTGSSFNFPQITLWQRPVVTVKVGGQLREALLDTGADDTVLEEINLPGKWKPKMIGGIGGFIKVRQYDQVCMEICGQKAIGTVLVGPTPVNIIGRNMLTQIGCTLNFPISPIETVPVKLKPGMDGPKVKQWPLTEEKIKALVEICTEMEKEGKISKIGPENPYNTPVFAIKKKDSTKWIKLVDFRELNKRTPDFWEVQLGIPHPAGLKKKKSVTVLDVGDAYFSVPLDKDFRKYTAFTIPSINNETPGIRYQYNVLPQGWKGSPAIFQCSMTKILEPFRRKNPDMVLYQYMDDLYVGSDLEIGQHRAKIEELREHLLRWGFTTPDKKHQKEPPFLWMGYELHPDKWTVQPIQLPDKDSWTVNDIQKLVGKLNWASQIFPGIKVKQLCKLLRGVKALTDIVPLTAEAELELAENREILKEPVHGVYYDPSKDLIAEIQKQGHGQWTYQIYQEPYKNLKTGKYARIRSAHTNDVKQLTEVVQKVAMESIVIWGKTPKFRLPIQKETWGTWWTEYWQATWIPEWEFVNTPPLVKLWYQLETEPIVGAETFYVDGAANRETKQGKAGYVTDKGRQKVISITETTNQKTELQAIHLALQDSGSEVNIVTDSQYALGIIQAQPDKSESELVNQIIEQLIKKDRVYLSWVPAHKGIGGNEQVDKLVSSGIRKVLFLDGIDKAQEEHEKYHNNWRAMASDFNLPPVVAKEIVASCDKCQLKGEAIHGQVDCSPGIWQLDCTHLEGKIILVAVHVASGYIEAEVIPAETGQETAYFILKLAGRWPVRVIHTDNGSNFTSAVVKAACWWADIKQEFGIPYNPQSQGVVESMNKELKKIIGQVREQAEHLKTAVQMAVFIHNFKRKGGIGGYSAGERIIDIIATDIQTKELQKQITKIQNFRVYYRDSREPIWKGPAKLLWKGEGAVVINSEIKVVPRRKAKIIRDYGKQMAGDDCVAGRQDED

SEQ ID NO: 963 - protein, 1003 aa, Artificial
  HIV Pol
FFRENLAFPQGEAREFSSEQTRANSPTSRELRVRGGDNPLSEAGDQRQGTEPSFNFPQITLWQRPIVTIKVGGQLREALLDTGADDTVLEEINLPGKWKPKMIGGIGGFIKVRQYDQVLIEICGQKAIGTVLVGPTPVNIIGRNLLTQIGCTLNFPISPIETVPVKLKPGMDGPKVKQWPLTEEKIKALTEICTEMEKEGKISKIGPENPYNTPVFAIKKKDSTKWRKLVDFRELNKRTQDFWEVQLGIPHPAGLKKKKSVTVLDVGDAYFSVPLDKDFRKYTAFTIPSINNETPGVRYQYNVLPQGWKGSPAIFQHSMTKILEPFRIKNPEMVIYQYMDDLYVGSDLEIGQPRTKIEELREHLLKWGFTTPDKKHQKEPPFLWMGYELHPDKWTVQPIQLPDKDSWTVNDIQKLVGKLNWASQIYPGIKVKQLCKLLRGVKALTDIVPLTAEAELELAENREILKEPVHGVYYDPSKDLIAEIQKQGNDQWTYQIYQEPHKNLKTGKYARMRSAHTNDVKQLTEAVQKIATEGIVIWGKTPKFRLPIQKETWETWWTEYWQATWIPEWEFVNTPPLVKLWYQLETEPIVGAETFYVDGAAHRETKKGRAGYVTDRGRQKVVSITETTNQKAELQAICLALQDSGSEVNIVTDSQYALGIIQAQPDKSESDLVNQIIEQLIKKERIYLSWVPAHKGIGGNEQVDKLVSAGIRKVLFLDGIDKAQEEHEKYHNNWRAMASDFNLPPIVAKEIVASCDKCQLKGEAIHGQVDCSPGIWQLDCTHLEGKIILVAVHVASGYIEAEVIPAETGQETAYFILKLAGRWPVKVIHTDNGTNFTSTVVKAACWWAGVKQEFGIPYNPQSQGVVESMNKELKKIIGQVRDQAEHLKTAVQMAVFIHNFKRKGGIGGYSAGERIVDIIATDIQTKELQKQILNIQKFRVYYRDSREPIWKGPAKLLWKGEGAVVIQDNSEIKVVPRRKAKIIRDYGKQMAGDDCVAGRQDED

SEQ ID NO: 964 - protein, 1011 aa, Artificial
  HIV Pol
FFREELVSLQRETRKLPPDNNKERAHSPATRELWVSGGEEHTGEGDAGEPGEDRELSVPTFNFPQITLWQRPVITVKIGKEVREALLDTGADDTVIEELQLEGKWKPKMIGGIGGFIKVRQYDNITVDIQGRKAVGTVLVGPTPVNIIGRNLLTQIGCTLNFPISPIETVPVKLKPGMDGPKVKQWPLTTEKIEALREICTEMEKEGKISRIGPENPYNTPIFAIKKKDSTKWRKLVDFRELNKRTQDFWEVQLGIPHPAGLKQKKSVTVLDVGDAYFSCPLDKDFRKYTAFTIPSINNETPGIRYQYNVLPQGWKGSPAIFQSTMTKILEPFREKHPEIIIYQYMDDLYVGSDLELAQHREAVEDLRDHLLKWGFTTPDKKHQKEPPFLWMGYELHPDKWTVQPIKLPEKDVWTVNDIQKLVGKLNWASQIYPGIRVKQLCKLIRGTKALTEVVNFTEEAELELAENREILKEPLHGVYYDPGKELVAEIQKQGQGQWTYQIYQELHKNLKTGKYAKMRSAHTNDIKQLVEVVRKVATESIVIWGKTPKFRLPVQKEVWEAWWTDHWQATWIPEWEFVNTPPLVKLWYQLETEPISGAETFYVDGAANRETKLGKAGFVTDRGRQKVVSIADTTNQKAELQAILMALQESGRDVNIVTDSQYAMGIIHSQPDKSESELVSQIIEELIKKERVYLSWVPAHKGIGGNEQVDKLVSSGIRKILFLDGIEKAQEDHDRYHSNWKAMASDFNLPPIVAKEIVASCDKCQLKGEAMHGQVNCSPGVWQLDCTHLEGKIILVAVHVASGYLEAEVIPAETGQETAYFILKLAGRWPVKVIHTDNGSNFTSATVKAACWWANIKQEFGIPYNPQSQGAVESMNKELKKIIGQIRDQAEHLKTAVQMAVFIHNFKRKGGIGGYTAGERIIDIIATDIQTTNLQTQILKVQNFRVYYRDSRDPIWKGPAKLLWKGEGAVVIQDNGDIKVVPRRKAKIIRDYGKQMAGDGCVASGQDENQ

SEQ ID NO: 965 - protein, 1000 aa, Artificial
  HIV Pol
  misc_feature (931)..(931): Xaa can be any naturally occurring amino acid
FFRQILASGGHEARQLCAETSTPISPTDGGGSEGTGESGTERGPERALSVCLPQIPLWDRPIVTARVGGHLCEVLLDTGADDTVLNNIQLEGKWKPKMIGGIGGFIKVKEYDNVTVEIEGREVQGTVLVGPTPVNIIGRNILTGLGCTLNFPISPIAPVPVKLKPGMDGPKVKQWPLSKEKIEALTAICQEMEQEGKISRIGPENPYNTPIFAIKKKDGTKWRKLVDFRELNKRTQEFWEVQLGIPHPGGLKQKQSVTVLDVGDAYFSCPLDPDFRKYTAFTIPSVNNETPGIRYQYNVLPQGWKGSPAIFQSSMTKILDPFRRDNPELEICQYMDDLYVGSDLPLTEHRKRIELLREHLYQWGFTTPDKKHQKEPPFLWMGYELHPDKWTVQSIQLPNKDVWTVNDIQKLIGKLNWASQIYQGIRVRELCKLIRGTKSLTEVVPLSREAELELEENRERLKQPVHGVYYQPDKDLWVNIQKQGGEQWTYQIYQEEHKNLKTGKYTRQKASHTNDIRQLAEVIQKVSQESIIIWGKLPKFKLPVTRETWETWWADYWQATWIPEWEFVSTPPLIKLWYRLESEPIMGAETYYVDGAANRETKLGKAGYVTEQGKQKIIKLDETTNQKAELMAILLALQDSKETVNIVTDSQYALGVISSQPTQSESPIVQQIIEELTKKEQVYLTWVPAHKGIGGNEKIDKLVSKDIRRVLFLEGIDQAQEDHEKYHSNWKALASEFGLPPVVAKEIIASCPKCHIKGEAIHGQVDCSPEVWQIDCTHMEGKIIIVAVHVASGFIEAEVIPAETGQETAYFLLKLAARWPVKVIHTDNGPNFTSTTMKAACWWANIQHEFGIPYNPQSQGVVEAMNKELKSIIQQVRDQAEHLRTAVQMAVFVHNFKRKGGIGGYTAGERIIDILASQIQTTELQKQILKXHKFRVYYRDSRDPIWKGPAQLLWKGEGAVVIQDKGDIKVVPRRKAKIIREYGKQMAGTDSMASGQTESE

SEQ ID NO: 966 - protein, 1000 aa, Artificial
  HIV Pol
FFREVLASGGHEARQLCAETSVPISPTNGGGSEGTRESESEGGSGRAVPICLPQIPLWDRPIVTAKVGGHLCEALLDTGADDTVLNNIQLEGRWTPKMIGGIGGFIKVKEYNNVTVEVQGKEVQGTVLVGPTPVNILGRNILTGLGCTLNFPISPIAPVPVKLKPGMDGPKVKQWPLSREKIEALTAICQEMEQEGKISRIGPENPYNTPIFAIKKKDSTKWRKLVDFRELNKRTQDFWEVQLGIPHPGGLKQRQSVTVLDVGDAYFSCPLDPDFRKYTAFTIPSVNNETPGVRYQYNVLPQGWKGSPAIFQSSMTKILDPFRKSNPEVEIYQYIDDLYVGSDLPLAEHRKRVELLREHLYQWGFTTPDKKHQKEPPFLWMGYELHPDKWTVQPIQLPDKEVWTVNDIQKLVGKLNWASQIYQGIRVKELCKLIRGTKSLTEVVPLSKEAELELEENREKLKEPVHGVYYQPDKDLWVSIQKHGEGQWTYQVYQDEHKNLKTGKYARQKASHTNDIRQLAEVVQKVSQEAIVIWGKLPKFRLPVTRETWETWWAEYWQATWIPEWEFVSTPPLIKLWYQLETEPIVGAETFYVDGAANRNTKLGKAGYVTEQGKQNIIKLEETTNQKAELMAVLIALQDSKEQVNIVTDSQYVLGIISSQPTQSDSPIVQQIIEELTKKERVYLTWVPAHKGIGGNEKIDKLVSKDIRRVLFLEGIDQAQEDHEKYHSNWRALASDFGLPPIVAKEIIASCPKCHIKGEATHGQVDYSPEIWQMDCTHLEGKIIIVAVHVASDFIEAEVIPAETGQETAYFLLKLAARWPVKVIHTDNGPNFTSAAMKAACWWTGIQHEFGIPYNPQSQGVVEAMNKELKSIIQQVRDQAEHLKTAVQMAVFVHNFKRKGGIGGYTAGERLIDILASQIQTTELQKQILKINNFRVYYRDSRDPIWKGPAQLLWKGEGAVVIQDKGDIKVVPRRKAKIIRDYGKQMAGTDSMANRQTESE

SEQ ID NO: 967 - protein, 1000 aa, Artificial
  HIV Pol
FFREILASGGHEARQLCAETSVPISPTDDGGNEGTRESGTEGGPERTLSVCLPQIPLWDRPVVTARVGGHLCEVLLDTGADDTVLTNIQLEGKWTPKMIGGIGGFIKVKEYNQVPVEIEGREVLGTVLVGPTPVNIIGRNILTGLGCTLNFPISPIAPVPVKLKPGMDGPKIKQWPLSKEKIEALTAICQEMEQEGKISRIGPENPYNTPIFAIKKKDSTKWRKLVDFRELNKRTQDFWEVQLGIPHPGGLKQKQSVTVLDVGDAYFSCPLDPDFRKYTAFTIPSVNNETPGIRYQYNVLPQGWKGSPAIFQSSMTKILDPFRKDNPELEICQYMDDLYVGSDLPLTEHRKRVELLREHLYQWGFTTPDKKHQKEPPFLWMGYELHPDKWTVQPIQLPNKEEWTVNDIQKLVGKLNWASQIYQGIRVKELCKLIRGAKSLTEIVPLSKEAELELEENREKLKEPVHGVYYQPDKDLWVNIQKQGWGQWTYQIYQDEHKNLKTGKYTRQKASHTNDIRQLAEVLQRVSQEAIIIWGKLPKFKLPITRETWETWWADYWQATWIPEWEFVSTPPLIKLWYQLESEPIMGAETYYVDGAANRDTKLGKAGYVTEKGRQKIIKLEETTNQRAELMAVLLALQDSKETVNIVQDSQYVLGIISSQPTQSESSLVQQIIEELTKKEQVYLTWVPAHKGIGGNEKIDKLVSKDIRRVLFLEGIDQAQEDHEKYHSNWRALASDFGLPPVVAKEIIANCPQCHIKGEAIHGQVDCSPEVWQMDCTHLEGKIIIVAVHVASGFIEAEVIPAETGQETAYFLLKLAARWPVKVIHTDNGPNFTSAAMKAACWWANIKHEFGIPYNPQSQGVVEAMNKELKSIIQQVRDQAEHLKTAVQMAVFVHNYKRKGGIGGYTAGERIIDILASQIQTTELQKQIFKIQKFQVYYRDSRDPIWKGPAQLLWKGEGAVVIQDKGDIKVVPRRKAKIIRHYGKQMAGTDSMASGQTESE

SEQ ID NO: 968 - protein, 1000 aa, Artificial
  HIV Pol
FFREILASGGHEARQLCTETSVPISPTDDGGNEGTRKSGTEGGPERTLSVCLPQIPLWDRPIVPARVGGHLCEVLLDTGADDTVLNNIQLEGKWTPKMIGGIGGFIKVKEYNQVPVEIEGREVLGTVLVGPTPVNIIGRNILTGLGCTLNFPISPIAPVPVKLKPGMDGPKIKQWPLSKEKIEALTAICQEMEQEGKISRIGPENPYNTPIFAIKKKDSTKWRKLVDFRELNKRTQDFWEVQLGIPHPGGLKQKQSVTVLDVGDAYFSCPLDPDFRKYTAFTIPSVNNETPGIRYQYNVLPQGWKGSPAIFQSSMTKILDPFRKNNPELEICQYMDDLYVGSDLPLTEHRKRVELLREHLYQWGFTTPDKKHQKEPPFLWMGYELHPDKWTVQPIQLPNKEEWTVNDIQKLVGKLNWASQIYQGIRVKELCKLIRGTKSLTEVVPLSKEAELELEENREKLKEPVHGVYYQPDKDLWVNIQKQGKGQWTYQIYQDEHKNLKTGKYTKQKASHTNDIRQLAEVLQKVSQEAIIIWGKLPKFKLPITRETWETWWADYWQATWIPEWEFVSTAPLIKLWYQLESEPIIGAETYYVDGAANRDTKLGKAGYVTEKGKQKIVKLEETTNQKAELMAVLLALQDSKETVNIVTDSQYVLGIISSQPTQSESPLVQQIIEELTQKEQVFLTWVPAHKGIGGNEKIDKLVSKDIRRVLFLEGIDQAQEDHEKYHSNWRALASDFGLPPVVAKEIIANCPKCHIKGEAIHGQVDYSPEVWQIDCTHLEGKIIIVAVHVASGFIEAEVIPAETGQETAYFLLKLAARWPVKIIHTDNGPNFTSATMKAACWWTGIKHEFGIPYNPQSQGVVEAMNKELKSIIQQVRDQAEHLKTAVQMAVFVHNYKRKGGIGGYTAGERIIDILASQIQTTELQKQIFKIQKFQVYYRDSRDPIWKGPAQLLWKGEGAVVIQDKGDIKVVPRRKAKIIRHYGKQMAGTDSMASGQTESE

SEQ ID NO: 969 - protein, 1004 aa, Artificial
  HIV Pol
FFRENLAFQQGEAREFSSEQTRANSPTSRELRVRRGDNPLAEAGAEGQGVPLPSFNFPQITLWQRPLVTVKIGGQLKEALLDTGADDTVVEEMTLPGKWKPKMIGGIGGFIKVRQYDQILIEICGKKAIGTVLVGPTPVNIIGRNMLTQIGCTLNFPISPIETVPVKLKPGMDGPKVKQWPLTEEKIKALTEICLEMEKEGKISKIGPENPYNTPVFAIKKKDSTKWRKLVDFRELNKRTQDFWEVQLGIPHPAGLKKKKSVTVLDVGDAYFSVPLDENFRKYTAFTIPSINNETPGIRYQYNVLPQGWKGSPAIFQSSMTKILEPFRKENPEIVIYQYMDDLYVGSDLEIGQHRAKIEELRAHLLRWGFTTPDKKHQKEPPFLWMGYELHPDKWTVQPIQLPNKDDWTVNDIQKLVGKLNWASQIYPGIQVRQLCKLLRGTKALTDIVPMTKEAELELAENREILKEPVHGVYYDPSKDLVAEIQKQGQDQWSYQIYQEPFKNLKTGKYAKRRSAHTNDVKQLTEAVQKISMESIVIWGKIPKFKLPIQKETWESWWTDYWQATWIPEWEFVNTPPLVKLWYQLEKDPIMGAETFYVDGAANRETKKGKAGYVTDRGRQKVISLTETTNQKAELQALYLALQDSGLEANIVTDSQYALGIIQAQPDSSESELVNQIIEQLIKKEKVYLSWVPAHKGIGGNEQADKLVSAGIRKVLFLDGIDKAQEEHERYHSNWRAMASDFNLPPIVAKEIVASCDKCQLKGEAMHGQVDCSPGIWQLDCTHLEGKVILVAVHVASGYLEAEVIPAETGQETAYFVLKLAGRWPVTVIHTDNGSNFTSAAVKAACWWAGIQQEFGIPYNPQSQGVVESMNKELKKIIGQVRDQAEHLKTAVQMAVFIHNFKRKGGIGGYSAGERIIDIIATDIQTKELQKQITKIQNFRVYYRDSRDPIWKGPAKLLWKGEGAVVIQDNSEIKVVPRRKAKIIRDYGKQMAGDDCVASRQDEN

SEQ ID NO: 970 - protein, 107 aa, Artificial
  HIV Rev
MAGRSGDNDDTLLQAVRIIKILYQSNPYPKPEGTRQARRNRRRRWRARQRQIHSISERILSTVLGRPAEPVPFQLPPIERLHIGCSESGGTSGTQQPQGTPEGMGNP

SEQ ID NO: 971 - protein, 107 aa, Artificial
  HIV Rev
MAGRSEDSDATLLQAVRIIKILYQSNPYPKPEGTRQARKNRRRRRRARQRQINSISERILSTCLGRPAEAVPLQLPPIERLHIGCNESGGTSGTQQSQGTSEGVGSP

SEQ ID NO: 972 - protein, 107 aa, Artificial
  HIV Rev
MAGRSGDSDEALLQAVRIIKVLYQSNPYPKPEGTRQARKNRRRRWRARQRQINSISGRILSACLGRPTEPVPFQLPPIERLHINCSENGGTSGTQQSQGTTEGVGNP

SEQ ID NO: 973 - protein, 107 aa, Artificial
  HIV Rev
MAGRSGDSDEALLQAVRIIRILYQSNPYPKPEGTRQARKNRRRRWRARQRQIRAISERILDTCLGRLTEPVHLPLPPLERLHLDCSEDCEPTGTEQSQGITEGVGSP

SEQ ID NO: 974 - protein, 100 aa, Artificial
  HIV Rev
MAGRSGDSDEALLQAVRTIKILYQSNPYPEPKGTRQARKNRRRRWRARQRQIHSISERILSACLGRSAEPVPFQLPPIERLHIDCSESSGNSGTQGVGSP

SEQ ID NO: 975 - protein, 107 aa, Artificial
  HIV Rev
MAGRSGDSDEALLQAIKSIKILYQSNPYPEPQGTRQAQRNRRRRWRARQRQIHSISERILSTCLGRSAEPVPLQLPPIERLHIDCSESGGTFGTQQSQGATEGVGNP

SEQ ID NO: 976 - protein, 100 aa, Artificial
  HIV Rev
MAGRSGDNDEAVLQAIRIIKILYQSNPYPKPRGTRQAQKNRRRRWRARQRQIDSISERVLSTVLGRPTEPVPFQLPPIERLDIGDSESGGTSGTERVGSP

SEQ ID NO: 977 - protein, 107 aa, Artificial
  HIV Rev
MAGRSGDSDEALLQAVKIIKILYQSNPYPEPKGTRQARKNRRRRWRARQRQIREISQRILSTYLGRPAEPVPLLLPPIERLHIDCSESGGTSGTQQSQGTTEGVGSP

SEQ ID NO: 978 - protein, 107 aa, Artificial
  HIV Rev
MAGRSGDSDEAVLQAVRIIKILYQSNPYPKPEGTRQARKNRRRRWRARQRQIHSISERILSTCLGRSTEPVPFQLPPIERLHIGDSKSSGTSGTQQSQGTTEGVGNP

SEQ ID NO: 979 - protein, 107 aa, Artificial
  HIV Rev
MAGRSGDGDAALLQAVRIIKILYQSNPYPKPEGTRQARKNRRRRWRARQRQIHSISERILSTCLGRPAEPVPFLLPPLERLHIGDSESSGTSGTQQSQGTPEGVGNP

SEQ ID NO: 980 - protein, 107 aa, Artificial
  HIV Rev
MAGRSGDSDEELLQVARIIKILYQSNPYPEPRGTRQARKNRRRRWRARQRQIREISERILCTCLGRSTEPVPFLLPPIERLHIGDSEGSGTSGTQQSQGTPEGVGNP

SEQ ID NO: 981 - protein, 107 aa, Artificial
  HIV Rev
MAGRSEDSDAALLQAAKIIKIIYQSNPYPEPKGTRQARRNRRRRWRARQRQIHTISERILSTCLGRPAEPVPLQLPPIERLHIDCSESSGTSGTQQSQGTTEGVGSP

SEQ ID NO: 982 - protein, 107 aa, Artificial
  HIV Rev
MAGRSGDNDEALLQAVRIIKILYQSNPFPKPEGTRQARKNRRRRWRARQRQIHSISERILSTCLGRSTEPVPFQLPPIERLHIGDSESSGTSGTQRSQGTPEGVGNP

SEQ ID NO: 983 - protein, 107 aa, Artificial
  HIV Rev
MAGRSGDNDEALLQAVRIIKILYQSNPYPEPQGTRQARKNRRRRWRARQRQINSISERILTTCLGRSEEPVPLQLPPIERLNIGGSESSGTSGTQQSQGTTEGVGNP

SEQ ID NO: 984 - protein, 107 aa, Artificial
  HIV Rev
MAGRSEDSDEALLQAIRLIKILYQSNPYPEPKGTRQARKNRRRRWRARQRQIDSISARILSTCLGRPAEPVPFQLPPIERLNIGDNESGGTSGTQQSQGTTEGVGSP

SEQ ID NO: 985 - protein, 109 aa, Artificial
  HIV Rev
MAGRSGDNDADAALLQAVKIIKILYQSNPYPKPEGTRQARKNRRRRWRARQKQIHSISERILSTCLGRSEEPVPLLLPPIERLRIGDSESSGTSGTQQSQGTPEGVGNP

SEQ ID NO: 986 - protein, 107 aa, Artificial
  HIV Rev
MAGRSGDSDEALLQAVRIIKILYQSNPYPKPEGTRQARKNRRRRWRARQREIHSISERILTTVLGRSAEPVPFQLPPIERLNINCSEGSGTSGTQQPQGTTEGVGNP

SEQ ID NO: 987 - protein, 100 aa, Artificial
  HIV Rev
MAGRSGDNDEARLQVVKIIKILYQSNPYPKPEGTRQARKNRRRRWRARQRQIHSISERILSTCLGRSTEPVPFQLPPIERLNIGDSEGSGTSGTQRVGSP

SEQ ID NO: 988 - protein, 107 aa, Artificial
  HIV Rev
MAGRSGDSDEALLQAVRIIKIIYQSNPYPKPEGTRQARRNRRRRWKARQRQIHTISERILSTCLGRPAEPVPLQLPPIERLYIGDSEGGGTSGTQQSQGTTEGVGSP

SEQ ID NO: 989 - protein, 107 aa, Artificial
  HIV Rev
MAGRSGDSDEDLLKAVRLIKILYQSNPYPKPEGTRRAQRNRRRRWRARQRQIHSISERILSACLGRPAEPVPFQLPPIERLNIGDSEGDRTYGTQQSQGTTEGVGSP

SEQ ID NO: 990 - protein, 107 aa, Artificial
  HIV Rev
MAGRSEDSDEALLRVVRIIKILYQSNPYPEPKGTRQARKNRRRRWRARQRQIDSISGRLLSTCLGRSAEPVPLQLPPIERLNIGDSESGGTSGTQQPQGTTEGVGSP

SEQ ID NO: 991 - protein, 107 aa, Artificial
  HIV Rev
MAGRSGDSDEALLQAIRTIKILYQSNPYPEPKGTRQARKNRRRRWRARQRQINSISERILSTCLGRSAEPVPLQLPPIERLHIDCSESGGTSGTQQSQGTTEGVGNP

SEQ ID NO: 992 - protein, 107 aa, Artificial
  HIV Rev
  misc_feature (24)..(24): Xaa can be any naturally occurring amino acid
MAGRSGDSDEALLHAVRTIKILYXSNPYPEPKGTRQARKNRKRRWRARQKQIHSISERILSACLGRSAEPVPLQLPPIERLHIGGSESGGTSGTQQSQGTKEGVGSP

SEQ ID NO: 993 - protein, 107 aa, Artificial
  HIV Rev
MAGRSGDSDEALLQAVRIIKILYQSNPYPEHQGTRQARKNRRRRWGARQRQINSITERILSDCLGRSAEPVPLQLPPIERLHIVDSESGGTSGTQQSQGTTEGVGSP

SEQ ID NO: 994 - protein, 107 aa, Artificial
  HIV Rev
MAGRSGDSDEALLQAVRIIKILYQSNPYPKPEGTRQARKNRRRRWRARQRQIHSLSERILSTCLGRSAEPVPLQLPPLERLHIGDSESGGTSGTQQSQGTTEGVGSP

SEQ ID NO: 995 - protein, 100 aa, Artificial
  HIV Rev
MAGRSGDSDEALLQAVKIIKILYQSDPYPKPEGTRQARKNRRRRWRARQKEIHSLSERILSTCLGRPAEPVPLQLPPLERLHIDCSESGGTSGTQGVGHP

SEQ ID NO: 996 - protein, 107 aa, Artificial
  HIV Rev
MAGRSGDNDEALLQAVRIIKILYQSNPYPKPEGTRQARKNRRRRWRARQRQIHSIGERILSTCLGRSAEPVPLQLPPLERLHIDCSESSGTPGTQQPQGDTEGVGRP

SEQ ID NO: 997 - protein, 107 aa, Artificial
  HIV Rev
MAGRSGDSDEALLQAVRIIRILYQSNPYPEPRGTRRARKNRRRRWRARQRQIHSISERILTTCLGRFTEPVPFQLPPIERLHIGDSESGGTSGTQQSQGTTEGVGNP

SEQ ID NO: 998 - protein, 107 aa, Artificial
  HIV Rev
MAGRSGDSDEALLQAVKIIKILYQSNPYPKPEEIRQARKNRRRRWRARQRQIHSISERILSTCLGRPTEPVPFQLPPIERLHIDCSESSGASGTQRSQGTTEGVGNP

SEQ ID NO: 999 - protein, 100 aa, Artificial
  HIV Rev
MAGRSGDSDEALLQAVKAIKILYQSNPYPEPKGTRQARKNRRRRWRARQRQIHSLSERILSACLGRPAEPVPFQLPPIERLHIDCSKSVGTSGTEGVGSP

SEQ ID NO: 1000 - protein, 107 aa, Artificial
  HIV Rev
MAGRSGDSDEALLQAVRIIKILYQSNPSPEPKGNRQARKNRRRRWRARQRQINSISERILSTCLGRSAEPVPFQLPPIERLHIGGSESGGTSGTQQSQGPTEGVGSP

SEQ ID NO: 1001 - protein, 107 aa, Artificial
  HIV Rev
MAGRSGDNDEALLQAVRIIKILYQSNPYPKPEGTRQARKNRRGRWRTRQKQINSISERILSTCLGRSAEPVPFLLPPIERLHISDSESSGTSGTQQSQGTPEGVGNP

SEQ ID NO: 1002 - protein, 107 aa, Artificial
  HIV Rev
MAGRSGDSDEALLQAVRIIKILYQNNPYPKPEGTRQARKNRRRRWRARQRQIHSISERILSTCLGRPAEPVPLQLPPIERLHIGGSENSGTTGTQQSQGTTEGVGSP

SEQ ID NO: 1003 - protein, 107 aa, Artificial
  HIV Rev
MAGRSEDSDEALLHAVRIIKILYQSNPYPEPKGTRQARKNRRRRWRARQRQIDSISTRILSTCLGRPEEPVPFQLPPIERLNIGDSESGGTSGTQQSQGTTEGVGSP

SEQ ID NO: 1004 - protein, 100 aa, Artificial
  HIV Rev
MAGRSGDSDAALLQAVRIIKILYQSNPYPKPKGTRQARKNRRRRWRARQRQIRAISARIFSACLGRPAEPVPLQLPPIERLHIGSSESGGTSGTQGVGSP

SEQ ID NO: 1005 - protein, 107 aa, Artificial
  HIV Rev
MAGRSGDNDEALLQAMGIIKILYQSNPYPKPEGTRRARKNRRRRWRARQRQIHSISERILSTCLGRPTEPVHLPLPPLERLHLDCSEDCEPTGTEQSQGATEGVGSP

SEQ ID NO: 1006 - protein, 107 aa, Artificial
  HIV Rev
MAGRSGDSDEALLQAVRIIKILYQSNPYPKPEGTRQARRNRRRRWRARQRQINSISERILSACLGRPAEPVPFLLPPIERLHIGDSESSGTSGTQQSQGTPEGVGNP

SEQ ID NO: 1007 - protein, 107 aa, Artificial
  HIV Rev
MAGRSGDSDEALLQAVRTIKILYQSNPYPKPEGTRQARKNRRRRWRARQRQIHSISERILSACLGRPTEPVPFQLPPIERLSIGDSESSGTSGTQQSQGTTEGVGSS

SEQ ID NO: 1008 - protein, 107 aa, Artificial
  HIV Rev
MAGRSGDSDEALLQAVRIIKILYQSNPQPKPEGTRQARKNRRRRWRARQKHIHSISERILSDCLGRSAEPVPLQLPPIERLHIDCSESGGTSGTQQSQGTAEGVGSP

SEQ ID NO: 1009 - protein, 107 aa, Artificial
  HIV Rev
MAGRSGDSDEALLQAVRIIKILYQSNSYPKPEGTRQARKNRRRRWRARQRQINSISERILSTCLGRSTEPVPFLLPPIERLHIGDSESSGTSGTQQSHGTPEGVGNP

SEQ ID NO: 1010 - protein, 100 aa, Artificial
  HIV Rev
  misc_feature (39)..(39): Xaa can be any naturally occurring amino acid
MAGRSGDSDEALLQAVRIIKILYQSNPPPERRGIGQARXNRRRRWRARQTQINSLSERIVSTCLGRPAERAPFQLPPIEKLHIDCSESGGTPGTQGVGNP

SEQ ID NO: 1011 - protein, 107 aa, Artificial
  HIV Rev
MAGRSGDDDERLLQAVRIIKILYQSNPYPSPEGTRQARRNRRRRWRARQRQIRALSERILSTVLGRPTEPVPFQLPPIERLNINCSESSGTSGTQQSLGTTEGVGSP

SEQ ID NO: 1012 - protein, 107 aa, Artificial
  HIV Rev
MAGRSGDSDEALLQAVRIIKILYQSNPYPKPEGTRQARKNRRRRWRARQRQINSISERILSTCLGRPAEPVPFQLPPIERLHIDCSESSGTSGTQHSQGTTEGVGNP

SEQ ID NO: 1013 - protein, 108 aa, Artificial
  HIV Rev
MAGRSGVSDEALLQAVKIIKILYQSNPYPNNPEGSRQAQRNRRRRWRARQRQIHSISERILSSCLGRPTEPVPFQLPPIERLHIGDSESGGTYGTQQPQGTTEGVGNP

SEQ ID NO: 1014 - protein, 107 aa, Artificial
  HIV Rev
MAGRSGDSDEALLQAVRIIKILYQSNRYPKPEGTRQAQRNRRRRWRARQRQIHSISERILSTCLGRSAEPVPLQLPPIERLHIADSKGGGTSGIQQPQGTTEGVGSP

SEQ ID NO: 1015 - protein, 107 aa, Artificial
  HIV Rev
MAGRSGDPDEALLQAIRIIKILYQSNPYPKPEGTRQARRNRRRRWRARQRQIHSISERILFTCLGRSTEPVPFQLPPIERLNIGDSESGGTYGTLQSQGTTEGVGSP

SEQ ID NO: 1016 - protein, 108 aa, Artificial
  HIV Rev
MAGRSEDSGDAALLQAVRIIKILYQSNPYPEPKGTRQARKNRRRRWRARQRQISSLSERILSTCLGRSAEPVPLQLPPIERLHIDCSESSGTSGTQQSQGTTEGVGSP

SEQ ID NO: 1017 - protein, 107 aa, Artificial
  HIV Rev
MAGRSGDSDEALLQAVRIIKILYQSNPYPKPKETRQARRNRRRRWRARQNQIRAISKRILSTCLGRPAEPVPLQLPPLERLHIGDSESGGTSGTQQSQGTTEGVGSP

SEQ ID NO: 1018 - protein, 107 aa, Artificial
  HIV Rev
MAGRSGDNDAALLLAVQTIKLLYQSNPYPKPEGTRQARRNRRRRWRARQRQIHSISERILSNCLGRPAEPVPFQLPPIEGLHIDCNESSGTSGTQQSQGTPEGVGNS

SEQ ID NO: 1019 - protein, 107 aa, Artificial
  HIV Rev
MAGRSGDSDEALLQAVRIIKILYQSNPCPEPRGTRQARKNRRRRWRARQRQIDSISQRILSDCLGGPAEPVSFQLPPIERLNIDCNESGGTSGTQQSQGTTEGVGSP

SEQ ID NO: 1020 - protein, 124 aa, Artificial
  HIV Rev
  misc_feature (124)..(124): Xaa can be any naturally occurring amino acid
MAGRSGDPDEDLIRAIRIIKILYQSNPYPKPRGTRQARKNRRRRWRARQRQIDSISERILSTCLGRPTEPVPLQLPPLERLHLDCSEDCGTCGTQQSQGAETGVGRPQTSVESSGILGSGIEDX

SEQ ID NO: 1021 - protein, 124 aa, Artificial
  HIV Rev
  misc_feature (124)..(124): Xaa can be any naturally occurring amino acid
TAGRSDDPDESLLQAIRTIKILYQSNPYPKPRGSRQAQRNRRRRWRARQRQIDSISERVLRTCLGRPTEPVPLQLPPLERLHIDCSEDCGTSGTLQSQGTETGVGRSQESVESSVILGSGTEEX

SEQ ID NO: 1022 - protein, 124 aa, Artificial
  HIV Rev
  misc_feature (124)..(124): Xaa can be any naturally occurring amino acid
MAGRSGDPDEDLLRAVRAIRILYQSNPSPDPRGSRQARKNRRRRWRARQRQIRAISERILSACLGRPTEPVPLQLPPLERLHLDCSEDCGTSGTQQPQGTETGVGRPQISVEPSVVLGSGTEEX

SEQ ID NO: 1023 - protein, 124 aa, Artificial
  HIV Rev
  misc_feature (124)..(124): Xaa can be any naturally occurring amino acid
MAGRSGSTDEELLQAARIIKILYQSNPYPPPEGTRQARKNRRRRWRARQRQIREISERILSTCLGRPTEPVPLLLPPLERLHLDCSEDGGTAETQQPQGTETGVGGTIFVESSVILGSRTKEQX

SEQ ID NO: 1024 - protein, 124 aa, Artificial
  HIV Rev
  misc_feature (20)..(20): Xaa can be any naturally occurring amino acid
  misc_feature (38)..(38): Xaa can be any naturally occurring amino acid
  misc_feature (45)..(45): Xaa can be any naturally occurring amino acid
  misc_feature (64)..(64): Xaa can be any naturally occurring amino acid
  misc_feature (68)..(68): Xaa can be any naturally occurring amino acid
  misc_feature (90)..(90): Xaa can be any naturally occurring amino acid
  misc_feature (99)..(99): Xaa can be any naturally occurring amino acid
  misc_feature (103)..(103): Xaa can be any naturally occurring amino acid
  misc_feature (105)..(106): Xaa can be any naturally occurring amino acid
  misc_feature (111)..(111): Xaa can be any naturally occurring amino acid
  misc_feature (115)..(115): Xaa can be any naturally occurring amino acid
  misc_feature (117)..(118): Xaa can be any naturally occurring amino acid
  misc_feature (124)..(124): Xaa can be any naturally occurring amino acid
MAGRSGGTDAELLTAVRIIXFLYQSNPYPTPRKTRQAXKNQRRRXRARQRQINSISKRIFSTCXGRSXEPVSLQLPPIERLHLDCSEDCXTSETQQSQXTETXVXXPQISXESSXIXXSGTKEX

SEQ ID NO: 1025 - protein, 124 aa, Artificial
  HIV Rev
  misc_feature (124)..(124): Xaa can be any naturally occurring amino acid
MAGRSGDSDEELLRAVRIIKILYKSNPYPKPKGSRQARKNRRRRWRARQRQIDSISERILSTCLGRPTEPVPLQLPPLERLHLDCCEDCGTSGTQQSQGAETGVGRHQVSVESPVILGSGTKNX

SEQ ID NO: 1026 - protein, 124 aa, Artificial
  HIV Rev
  misc_feature (124)..(124): Xaa can be any naturally occurring amino acid
MAGRSGPGDEELLKAIRIIKILYQSNPYPKPRGTRQARKNRRRRWRARQRQIDSISERILSACLGRSTEPVPLQLPPLERLNLDCREDCGTSGTQQSQGVETGVGRPQVSGESPVILGSGTKNX

SEQ ID NO: 1027 - protein, 124 aa, Artificial
  HIV Rev
  misc_feature (124)..(124): Xaa can be any naturally occurring amino acid
MAGRSGDSDEELLRAVRIIKILYQSNPYPRPKGSRQAQKNRRRRWRARQRQIDSISERILSTCLGRSEEPVPLQLPSLETLHLDCHDDCGTSGTQQSQGVETGVGRPQVPGEPSTVLGSGTKTX

SEQ ID NO: 1028 - protein, 124 aa, Artificial
  HIV Rev
  misc_feature (124)..(124): Xaa can be any naturally occurring amino acid
MAGRSGNSDEELLRAIRIIKILYNSNPYPKPKGSRQARKNRRRRWRARQRQIDSISERILNACLGGSTEPVPLQLPPLERLNLDCREDCGTSGTQQSQGIETGVGRPQVSVESPVILGSGTKEX

SEQ ID NO: 1029 - protein, 117 aa, Artificial
  HIV Rev
  misc_feature (117)..(117): Xaa can be any naturally occurring amino acid
MAGRSGNSDEELLRAIRIIKILYQSNPHPKPRGSRQARKNRRRRWRARQRQIDSISERILSTCLGRSAEPVPLQLPPLEGLHLDCCEDCGTSGTEGVGRPQVSVESPGVLDSGTKNX

SEQ ID NO: 1030 - protein, 124 aa, Artificial
  HIV Rev
  misc_feature (124)..(124): Xaa can be any naturally occurring amino acid
MAGRSGDSDEELLKAVRIIKILYQSNPYPKPRGTRQARKNRRRRWRARQKQIDSLSERILSTCLGRPQEPVPLLLPPIERLHLDCSEDCGTSGTQQSQGAETGVGGPQVSEESSIILGSGTKTX

SEQ ID NO: 1031 - protein, 113 aa, Artificial
  HIV Rev
  misc_feature (113)..(113): Xaa can be any naturally occurring amino acid
MAGRSGDSDEELLKAVRTIKILYQSNPYPQPKGSRQARKNRRRRWRARQRQIDSLSQRILSACLGRSEEPVPLQLPPLERLHIDCHEDCGTSGTGTQVSGESSVVLDSGTKDX

SEQ ID NO: 1032 - protein, 124 aa, Artificial
  HIV Rev
  misc_feature (124)..(124): Xaa can be any naturally occurring amino acid
MAGRSGNPDEELLRAIRIIKILYQSNPYPEPKGTRQARKNRRRRWRARQRQIDTLSERVLSTCLGRPAEPVPLQLPPIERLHLDCSEDCGTSGTQQSQGVETGVGRTQVSGESPVVLGSGTKNX

SEQ ID NO: 1033 - protein, 124 aa, Artificial
  HIV Rev
  misc_feature (124)..(124): Xaa can be any naturally occurring amino acid
MARRSGNPDEDLLKAVRIIKLLYQSNPCPNPRGSRQARKNRRRRWRARQRQIDSLSERILSDCLGRPAEPVPLQLPPIERLRLDCSESCGTSGTQQPQGTETGVGGPQISVESSAVLGSGTKNX

SEQ ID NO: 1034 - protein, 124 aa, Artificial
  HIV Rev
  misc_feature (124)..(124): Xaa can be any naturally occurring amino acid
MAGRSGDSDEELLQVVRIIKILYRSNPYPKPRGTRQARKNRRRRWRARQRQIDSISERILSTFLGRSAEPVPLQLPPLERLHLDCQEDCGTSGTQQSQGVETGVGRPQVSVESPGILGSGTKNX

SEQ ID NO: 1035 - protein, 124 aa, Artificial
  HIV Rev
  misc_feature (124)..(124): Xaa can be any naturally occurring amino acid
MAGRSGDSDETLLQAVKIIKILYQSNPYPKPEGTRQARRNRRRRWRARQRQIHSISERILSTCLGRPTEPVPFQLPPIERLTIDCSEDGGTSGTQQSQGTTEGVGNPVSRKSCAVLGSGTKKEX

SEQ ID NO: 1036 - protein, 117 aa, Artificial
  HIV Rev
  misc_feature (117)..(117): Xaa can be any naturally occurring amino acid
MAGRSGDSDEALLQAVRIIKILYQSNPYPKPRGTRQARKNRRRRWRARQRQIDSISERILSTCLGRSAEPVPLQLPPLERLHLDSGTQQSQGTETGVGRPQVSVESSAILGPGTKNX

SEQ ID NO: 1037 - protein, 117 aa, Artificial
  HIV Rev
  misc_feature (117)..(117): Xaa can be any naturally occurring amino acid
MAGRSGDSDEDLLRAIRIIKILYKSNPYPKPRGSRQARKNRRRRWRARQRQIDSISQRILSTCLGRSEEPVPLQLPPLERLNLDCCEDCGTSGTQGVGSNQISVESPAVLDSGTKEX

SEQ ID NO: 1038 - protein, 117 aa, Artificial
  HIV Rev
  misc_feature (117)..(117): Xaa can be any naturally occurring amino acid
MAGRSGASDEELLRAVRIVKILYQSNPYPKPEGTRQARRNRRRRWRARQRHIHSLSERILCTCLGRSEEPVHLPLPPLEGLTLDCNESSGTSGTEGVGSSQTSGEHPVILESGTKEX

SEQ ID NO: 1039 - protein, 117 aa, Artificial
  HIV Rev
  misc_feature (11)..(11): Xaa can be any naturally occurring amino acid
  misc_feature (117)..(117): Xaa can be any naturally occurring amino acid
MAGRSGDSDEXLLKAVRLIKTLYQSNPPPSPEGTRQARRNRRRRWRARQRQINSIGERILSTYLGRSQEPVPLQLPPLERLTLNCIEDCGTSGTQGVGSPQIPVEPPAVLDSGTKEX

SEQ ID NO: 1040 - protein, 117 aa, Artificial
  HIV Rev
  misc_feature (117)..(117): Xaa can be any naturally occurring amino acid
MAGRSGNSDEELLQAARIIKILYQSNPYPKPKGSRQARKNRRRRWRARQNQIDSISKRILSNCLGRPAEPVPLQLPPLERLNLNCSKDCGTSGTQGVGSPQIPVESPAILDSGTENX

SEQ ID NO: 1041 - protein, 117 aa, Artificial
  HIV Rev
  misc_feature (50)..(50): Xaa can be any naturally occurring amino acid
  misc_feature (117)..(117): Xaa can be any naturally occurring amino acid
MAGRSGDRDADLLKAVRIIKILYQSNPYPEPTGSRQARRNRRRRWRARQXQIHSIGERVLATCMGRPAEPVPLQLPPLERLTLDSSEDCDIAGKQGVGDPQIPGESSAVLGTGTKEX

SEQ ID NO: 1042 - protein, 118 aa, Artificial
  HIV Rev
  misc_feature (118)..(118): Xaa can be any naturally occurring amino acid
MAGRSGDSDEDLLRAIRLIKILYQSNPPPNTEGTTRQARRNRRRRWRARQRQINSIGERILSTYLGRPEEPVPLQLPPLERLTLNCNEDCGTSGTQGVGSPQISVESPAILGSGTEEX

SEQ ID NO: 1043 - protein, 124 aa, Artificial
  HIV Rev
  misc_feature (124)..(124): Xaa can be any naturally occurring amino acid
MAGRTGSTDEELLKAVRTIKILYQSNPYPSSEGSRQARKNRRRRWRARQRHIQAISRRILDACLGRPAEPVPLQLPPLERLSLDCSKDIGTSGTQRSQGTETGVGRPQIFVESSGVLGSGTKEX

SEQ ID NO: 1044 - protein, 124 aa, Artificial
  HIV Rev
  misc_feature (124)..(124): Xaa can be any naturally occurring amino acid
MAGRSGDADEELLRVTRIIKILYQSNPYPPPEGTRQARKNRRRRWRARQRQISALSERILSTCLGRPAEPVPLQLPPIERLSLDCSEDSRTPETQQSPGTETGVGGPQISVESPVVLGSGTKEX

SEQ ID NO: 1045 - protein, 117 aa, Artificial
  HIV Rev
  misc_feature (117)..(117): Xaa can be any naturally occurring amino acid
MAGRSGASDEELLKAVRIIKILYQSNPFPEPTGTRQARRNRRRRWRARQKQIHSIGERVLATYLGRPAEPVPLQLPPLERLTLDCSEDCGTSGEKGVGSPQISVESPTVLGTGAKEX

SEQ ID NO: 1046 - protein, 117 aa, Artificial
  HIV Rev
  misc_feature (117)..(117): Xaa can be any naturally occurring amino acid
MAGRSGDSDEELLKIVRIIKILYQGNPYPPPEGTRQARRNRRRRWRARQRQIHSLGERILTTCLGRSTEPVPFLLPPIERLRIDCSEDRGDSDPQGVGDSQIPGESCDLLGSGTKEX

SEQ ID NO: 1047 - protein, 117 aa, Artificial
  HIV Rev
  misc_feature (117)..(117): Xaa can be any naturally occurring amino acid
MAGRSGDNDEQLLLAIRIIKILYKSNPYPKPNGSRQARRNRRRRWRARQNQIDSISERILSTCLGRPTEPVPFQLPPIERLRLDCSEDCGHSGTQGVGDPQVSGESCPILGEGTKEX

SEQ ID NO: 1048 - protein, 117 aa, Artificial
  HIV Rev
  misc_feature (117)..(117): Xaa can be any naturally occurring amino acid
MAGRSGDSDDELLKTVRLIKFLYQSNPPPSPEGTRQARRNRRRRWRARQRQIRQISGWILSTYLGRPAEPVPLQLPPLERLTLDCSKDCGTSGTQGVGGPQVLVESPAVLESGAAEX

SEQ ID NO: 1049 - protein, 117 aa, Artificial
  HIV Rev
  misc_feature (117)..(117): Xaa can be any naturally occurring amino acid
MAGRSEDSDEELLKTVRLIKLLYQSNPLPSPEGTRQARRNRRRRWRARQRQIREISDRILVTYLGGSTEPVPLQLPPLERLTLDCSKDCGTSGTQGVGSPQILVESPAVLDSGTKEX

SEQ ID NO: 1050 - protein, 117 aa, Artificial
  HIV Rev
  misc_feature (117)..(117): Xaa can be any naturally occurring amino acid
MAGRSGDSDEELLKTVRLIKFLYQSNPPPSPEGTRQARRNRRRRWRQRQRQIQSISERILSTYLGRPEQPVPLPLPPLERLTLDCSEDCGTSGTQGVGSPQILVESPAVLESGTKEX

SEQ ID NO: 1051 - protein, 117 aa, Artificial
  HIV Rev
  misc_feature (117)..(117): Xaa can be any naturally occurring amino acid
MAGRSGDSDEELLKTVRLIKFLYQSNPPPSNEGTPTARRNRRRRWRERQRQIRSISERILSTFLGRPAEPVPLQLPPLERLTLDCSEDCGNSGTQGVGSPQVLVESPAVLEPGTKEX

SEQ ID NO: 1052 - protein, 117 aa, Artificial
  HIV Rev
  misc_feature (117)..(117): Xaa can be any naturally occurring amino acid
MAGRSGDSDEELIRTVRLIKLLYQSNPPPNPEGTRQARRNRRRRWRERQRQIHSISERILGTYLGRSAEPVPLQLPPLERLTLDCNEDCGTSGTQGVGSPQILVESPTVLESGTKEX

SEQ ID NO: 1053 - protein, 117 aa, Artificial
  HIV Rev
  misc_feature (117)..(117): Xaa can be any naturally occurring amino acid
MAGRSGDSDEELLKTVRLIKFLYQSNPPPNPEGTRQARRNRRRRWRERQRQIRKISGWILSTYLGRSAEPVPLQLPPLERLNLDCSEDCGTSGTQGVGSPEILVESPAVLEPGTKEX

SEQ ID NO: 1054 - protein, 117 aa, Artificial
  HIV Rev
  misc_feature (117)..(117): Xaa can be any naturally occurring amino acid
MAGRSGDSDEELLKAVRLIKLLYQSNPLPSSKGTRQARRNRRRRWRERQRHIRAISNWILSTHLGRPAEPVPLQLPPLERLTLDCSKDCGTSGTQGVGSPQILVESPAVLESGTKEX

SEQ ID NO: 1055 - protein, 117 aa, Artificial
  HIV Rev
  misc_feature (117)..(117): Xaa can be any naturally occurring amino acid
MAGRSGDSDEDFLKTVRFIKFLYQSNPPPNPKGTRQARRNRRRRWRARQRQIHQIGEWILSAFLGRPAEPVPLQLPPIERLTLDCDEDCGTSGTQGVGSPQVLVESPAVLDPGTKEX

SEQ ID NO: 1056 - protein, 117 aa, Artificial
  HIV Rev
  misc_feature (117)..(117): Xaa can be any naturally occurring amino acid
MAGRSGDSDEELLQTVKLVKFLYQSNPPPSPEGTRQARRNRRRRWRGRQRQIQSLSAWILSTRLGRSTQPVPLQLPPLERLTLDCSEDCGTSGTQGVGNPQVLVESPAVLESGSKEX

SEQ ID NO: 1057 - protein, 117 aa, Artificial
  HIV Rev
  misc_feature (117)..(117): Xaa can be any naturally occurring amino acid
MAGRSGDSDEELLRTIRIIKFLYQSNPLPEPEGTRQARRNRRRRWRRRQWWIQSLSGWILNTHLGRPAEPVPLQLPPLERLTLDCNEECGTSGTQGVGNPQILVESPAVLESGTKEX

SEQ ID NO: 1058 - protein, 117 aa, Artificial
  HIV Rev
  misc_feature (117)..(117): Xaa can be any naturally occurring amino acid
MAGRSGDSDEDLLKTVRLIKFLYQSNPPPSPEGTRQARRNRRRRWRERQRQIRSISERILSTYLGRSAEPVPLQLPPLERLTLDCDEDCGTSGTQGVGSPQILVESPAVLESGTKEX

SEQ ID NO: 1059 - protein, 117 aa, Artificial
  HIV Rev
  misc_feature (117)..(117): Xaa can be any naturally occurring amino acid
MAGRSGDSDEELLRTVRLIKLIYQSNPPPNPEGTRQARRNRRRRWRERQRQIRTISGWILSNYLGRPAEPVPLQLPPLERLTLDCDEDCGTSGTQGVGSPQIFVESPTVLDSGTKEX

SEQ ID NO: 1060 - protein, 117 aa, Artificial
  HIV Rev
  misc_feature (117)..(117): Xaa can be any naturally occurring amino acid
MAGRSGDSDEELLKTVRLIKLLYQSNPPPNPEGTRQARRNRRRRWRERQRQIRSISERILSTFLGRSAEPVPLQLPPLERLNLGCNEDCGTSGTQGVGSPQVLVESPTVLEPGTKEX

SEQ ID NO: 1061 - protein, 117 aa, Artificial
  HIV Rev
  misc_feature (117)..(117): Xaa can be any naturally occurring amino acid
MAGRSGESDEDLLNTVRLIKLLYQSNPLPSLEGTRQARRNRRRRWRQRQRQIQSISGWILSNHLGRPADAVPLQLPPLERLTLDCNEDCGTSGTQGVGTPQILVESPAVLESGTKEX

SEQ ID NO: 1062 - protein, 117 aa, Artificial
  HIV Rev
  misc_feature (117)..(117): Xaa can be any naturally occurring amino acid
MAGRSGDSDEDLLKTVRLIKFLYQSNPPPSNEGTRQARRNRRRRWRERQRQIRTISERILSTYLGRPAEPVPLQLPPLERLTLDCNEDCGTSGTQGVGNPEILVESPTVLESGTKEX

SEQ ID NO: 1063 - protein, 116 aa, Artificial
  HIV Rev
  misc_feature (116)..(116): Xaa can be any naturally occurring amino acid
MAGRSGDSDEELLKTVRLIKFLYQSNPPPSSEGTRQARRNRRRRWRERQRHIRSISAWILSNYLGRPAEPVPLQLPPQRLTLDCSEDCGTSGTQGVGSPQILVESPTVLESGTKEX

SEQ ID NO: 1064 - protein, 117 aa, Artificial
  HIV Rev
  misc_feature (117)..(117): Xaa can be any naturally occurring amino acid
MAGRSGDSDEDLLKTVRLIKFLYQSNPPPSLEGTRQARRNRRRRWRERQRQIRSISERILGTFLGRFEEPVPLPLPPLEKLTLDCNEDCGTSGTQGVGSPQILVESPAILEPGTKEX

SEQ ID NO: 1065 - protein, 117 aa, Artificial
  HIV Rev
  misc_feature (117)..(117): Xaa can be any naturally occurring amino acid
MAGRRGDSDEDLLKAVRLIKSLYQSNPPPSPEGTRQARRNRRRRWRERQRQIRRCSEWILDTYLGRSVDPVQLQLPPLERLTLDSSEDCGTSGTQGVGSPQVLVESPAVLESGAKEX

SEQ ID NO: 1066 - protein, 117 aa, Artificial
  HIV Rev
  misc_feature (117)..(117): Xaa can be any naturally occurring amino acid
MAGRSGDSDEELLRTVRLIKLLYQSNPPPSPEGTRQARRNRRRRWRERQRQIRSISGWILSTYLGRSAEPVPLQLPPLERLTLDCSEDCGNSGAQGVGSPQILVESPAVLDSGTKEX

SEQ ID NO: 1067 - protein, 117 aa, Artificial
  HIV Rev
  misc_feature (117)..(117): Xaa can be any naturally occurring amino acid
MAGRSGDSDEDLLKTVRLIKILYQSNPPPSPEGTRQARRNRRRRWRERQRQIRKISGWILNTYLGRPTEPVPLPLPPLDRLTLDCKEDCGTSGTQGVGSSQILLESPAVLEPGTKEX

SEQ ID NO: 1068 - protein, 115 aa, Artificial
  HIV Rev
  misc_feature (115)..(115): Xaa can be any naturally occurring amino acid
MAGRSGDSDEELLQKVLIRFLYQSNPPPSSEGTRQARRNRRRRWERQRQIQSLSAWIISTHLGRPAEPVPLQLPPLERLTLDCSEDCGTSGTQGVGDPQILGESPTVLGSGAKEX

SEQ ID NO: 1069 - protein, 117 aa, Artificial
  HIV Rev
  misc_feature (117)..(117): Xaa can be any naturally occurring amino acid
MAGRSGDSDEDLLRTVRLIKVLYQSNPPPSSEGTRQARRNRRRRWRERQRQIRSISGWLLSNYLGRPTEPVPFQLPPLERLTLDCNEDCGTSGTQGVGSPQILVESPPVLDSGTKEX

SEQ ID NO: 1070 - protein, 117 aa, Artificial
  HIV Rev
  misc_feature (117)..(117): Xaa can be any naturally occurring amino acid
MAGRSGDSDTELLKAVSYIKILYQSNPLPKPKGTRQARRNRRRRWRARQRQIREISERILSSCLGRPEEPVPLQLPPLERLHINCSEDCGQGTEEGVGSPQTSGESRAVLESGTKEX

SEQ ID NO: 1071 - protein, 124 aa, Artificial
  HIV Rev
  misc_feature (124)..(124): Xaa can be any naturally occurring amino acid
MAGRSGDSDEALLQAVRIIKILYQSNPYPKPEGTRQARRNRRRRWRARQRQIHSISERILSTCVGRPAEPVPFQLPPIERLNINCSESGGTSGTQQPQGNTERVGNPVFGRPCAVLESRVKKEX

SEQ ID NO: 1072 - protein, 124 aa, Artificial
  HIV Rev
  misc_feature (124)..(124): Xaa can be any naturally occurring amino acid
MAGRSGDSDEALLQAVRIIKILYQSNPYPKPEGTRQAWRNRRRRWRARQRQIHSISERILSTCLGRPTEPVPLQLPPIERLHIDCSESSGASGTQQSQGTTEGVGNPVSGKSCAILGSRAKKEX

SEQ ID NO: 1073 - protein, 124 aa, Artificial
  HIV Rev
  misc_feature (124)..(124): Xaa can be any naturally occurring amino acid
MAGRSGDNDEALLQAVRIIKILYQSNPYPKPEGTRQARKNRRRRWRARQKQINSISERILSTCLGRSAEPVPFLLPPIERLHISDSESGGTSGTQQSQGTPEGVGNPISGKSCAVLGARAKKEX

SEQ ID NO: 1074 - protein, 124 aa, Artificial
  HIV Rev
  misc_feature (124)..(124): Xaa can be any naturally occurring amino acid
MAGRSGDSDEALLQAVRIIKILYQNNPYPKPEGTRQARKNRRRRWRARQRQIHSISERILSTCLGRPAEPVPLQLPPIERLHIGGSENSGTTGTQQSQGTTEGVGSPISGKSCAVLGSGTKKEX

SEQ ID NO: 1075 - protein, 124 aa, Artificial
  HIV Rev
  misc_feature (124)..(124): Xaa can be any naturally occurring amino acid
MAGRSEDSDEALLHAVRIIKILYQSNPYPEPKGTRQARKNRRRRWRARQRQIDSISTRILSTCLGRPEEPVPFQLPPIERLNIGDSESGGTSGTQQSQGTTEGVGSPVSGKSCAVLGSGTKKEX

SEQ ID NO: 1076 - protein, 124 aa, Artificial
  HIV Rev
  misc_feature (124)..(124): Xaa can be any naturally occurring amino acid
MAGRSGDSDEELLKAVRIIKILYQSNPYPTPEGTRQARRNRRRRWRARQRQIHTLSERILSNFLGRPAEPVPLQLPPLERLNLDCSEDSGTSGTQQSQGTTEGVGNPISGKPCAVLGSGAKKEX

SEQ ID NO: 1077 - protein, 117 aa, Artificial
  HIV Rev
  misc_feature (117)..(117): Xaa can be any naturally occurring amino acid
MAGRSGDSDEALLQAVRIIKILYQSNPYPEPKGTRQARKNRRRRWRARQRQIHSISERILSTCLGRSTEPVPLQLPPIERLHIGGSESGGTSGTQQLGSPISGKSCAVLGSGAKKEX

SEQ ID NO: 1078 - protein, 124 aa, Artificial
  HIV Rev
  misc_feature (124)..(124): Xaa can be any naturally occurring amino acid
MAGRSGDSDEELLKAVRIIKILYQSNPYPEPRGTRQARKNRRRRWRARQRQIHSLSERILSACLGRPAEPVPLQLPPLERLHISGSESGGTSGTQQSQGTTERVGSPISGKSCAVLGSGAKKEX

SEQ ID NO: 1079 - protein, 124 aa, Artificial
  HIV Rev
  misc_feature (124)..(124): Xaa can be any naturally occurring amino acid
MAGRSGDSDEALLRAVRIIKILYQSNPYPEPRGTRQARKNRRRRWRARQKQIHSLSERILSTCLGRSAEPVPLQLPPLERLHISGSESGGTSGTQQSQGTTEGVGSPISGKSCAVLGYRAKKEX

SEQ ID NO: 1080 - protein, 124 aa, Artificial
  HIV Rev
  misc_feature (124)..(124): Xaa can be any naturally occurring amino acid
MAGRSGDSDEALLKAVRIIKILYQSNPYPEPRGTRQARKNRRRRWRARQRQIHSISERILSACLGRPAEPVPLQLPPIERLHISGSESGGTSGTQQSQGTTERVGSPISGKSCAVLGSGAKKEX

SEQ ID NO: 1081 - protein, 124 aa, Artificial
  HIV Rev
  misc_feature (124)..(124): Xaa can be any naturally occurring amino acid
MAGRSGDSDEALLKAVRIIKILYQSNPYPEPRGTRQARKNRRRRWRARQRQIHSISERILSTFLGRPAEPVPLQLPPIERLHISGSESAGTSGTPQSQGTTEGVGSPISGKSCTVLGSGAEKEX

SEQ ID NO: 1082 - protein, 124 aa, Artificial
  HIV Rev
  misc_feature (124)..(124): Xaa can be any naturally occurring amino acid
MAGRSGNTDEDLLQAVRIIKILYQSNPYPPPEGTRQARKNRRRRWRRRQRQIHSLSERILVACVGRSTEPVPLQLPPLERLHIDCSEDCGTSGTQQSQGTETGVGGPQISGESSVILGSGTKNX

SEQ ID NO: 1083 - protein, 124 aa, Artificial
  HIV Rev
  misc_feature (124)..(124): Xaa can be any naturally occurring amino acid
MAGRSGSTDEDLLRTVRIIKILYQSNPYPPAEGTRQARKNRRRKWRARQRQIHKIGERILSTCLGRSPEPVPLQLPPLERLHLDCSEDCGTSGTQQSTGTETEVGRPQISGESSVILGSGTKNX

SEQ ID NO: 1084 - protein, 124 aa, Artificial
  HIV Rev
  misc_feature (124)..(124): Xaa can be any naturally occurring amino acid
MAGRSGSTDEELLRAARAIKILFQSNPYPSSEGTRQARKNRRRRWRARQRQIRALSERILSACLGRSAEPVPLQLPPLERLHLDCSEDCGTSGTQQSRGTETGVGRPQISGESSVILGSGTENX

SEQ ID NO: 1085 - protein, 124 aa, Artificial
  HIV Rev
  misc_feature (124)..(124): Xaa can be any naturally occurring amino acid
MAGRSGSTDEELLRAVRIINILYQSNPYPSSEGTRQTRKNRRRRWRARQRQIRAISERILITCLGRSTEPVPLQLPPLERLHLDCNEDCGTSGTQQSQGTETGVGRPQISGESSVILGPGTKNX

SEQ ID NO: 1086 - protein, 124 aa, Artificial
  HIV Rev
  misc_feature (124)..(124): Xaa can be any naturally occurring amino acid
MAGRSGSTDEELLRAVRIIKVLYQSNPYPSSEGTRQTRKNRRRRWRARQRQIRAISERILNACVGRSTEPVPLQLPPLERLHLDCSEDCGTSGTQQSQGTETGVGRPQISGESSVILGSGTKNX

SEQ ID NO: 1087 - protein, 125 aa, Artificial
  HIV Rev
  misc_feature (125)..(125): Xaa can be any naturally occurring amino acid
MAGRSGSTDEELLRAVRIINILYQSNPYPSSEGGTRQTRKNRRRRWRARQRQIRAISERILSTCLGRSTEPVPLQLPPLERLHLDCSEDCGTSGTQQSQGTETGVGRPQISGESSVILGPGTKNX

SEQ ID NO: 1088 - protein, 124 aa, Artificial
  HIV Rev
  misc_feature (124)..(124): Xaa can be any naturally occurring amino acid
MAGRSGSTDEELLRAVRIIKLLYESNPPPSSEGTRQTRKNRRRRWRARQRQIREISERILSSCVGRSTEPVPLPLPPLERLHLDCSEDCGTSGTQQSQGTETGVGRPQISGESPVILGPGTKNX

SEQ ID NO: 1089 - protein, 124 aa, Artificial
  HIV Rev
  misc_feature (124)..(124): Xaa can be any naturally occurring amino acid
MAGRSGSTDEELLRAVRIIKILYQSNPFPSSEGTRQTRRNRRRRWRARQRQISAISERILSTCLGRSTEPVPLQLPPVERLNLDCSEDGGTSGTQQSQGTETGVGRPQISGESSVILGPGTKNX

SEQ ID NO: 1090 - protein, 124 aa, Artificial
  HIV Rev
  misc_feature (124)..(124): Xaa can be any naturally occurring amino acid
MAGRSGSTDEELLRAVKIINILYQSNPLPSSEGSRQTRKNRRRRWRARQRQISAISERILSACLGRSTEPVSLPLPPLERLHLDCSEDCGTSGTQQSQGTETGVGRPQISVESSGILGPGTKNX

SEQ ID NO: 1091 - protein, 124 aa, Artificial
  HIV Rev
  misc_feature (124)..(124): Xaa can be any naturally occurring amino acid
MAGRSGDADEELLRVVRIIKILYQSNPYPPPEGTRQTRKNRRRRWRARQRQIRAISERFLSTCLGRSAEPVPLQLPPIERLCLDCSEGCGTSGTQQPQGTETGVGSPPISGESSTILGSGTKEX

SEQ ID NO: 1092 - protein, 124 aa, Artificial
  HIV Rev
  misc_feature (6)..(6): Xaa can be any naturally occurring amino acid
  misc_feature (124)..(124): Xaa can be any naturally occurring amino acid
MAGRSXDADEELLRVVRIVKILYQSNPYPPPEGTRQARKNRRGRWRARQRQIRAISQRILSTCLGRSAEPVPLQLPPLERLCLDCSEGCGTSGTQQSQGTETGLGSPQISGESSDILGAGTKEX

SEQ ID NO: 1093 - protein, 117 aa, Artificial
  HIV Rev
  misc_feature (117)..(117): Xaa can be any naturally occurring amino acid
MAGRSGDADEELLRVIRIIKILYQSNPYPKPEGTRQARRNRRRRWRARQRQIHSLSERILSTCLGRPEEPVSFQLPPLERLNLDCSEDCGNSGTQSVADPQIPGESRAILGSGTKEX

SEQ ID NO: 1094 - protein, 124 aa, Artificial
  HIV Rev
  misc_feature (124)..(124): Xaa can be any naturally occurring amino acid
MAGRSGDADEELLRAVRIIKILYQSNPYPPPEGTRQTRKNRRRRWRARQRQIRAISERILSTCLGRSAEPVPLQLPPIERLNLDCSEDCGTSGTQLSQGTETGVGSPQISVESYIILGSGTKEX

SEQ ID NO: 1095 - protein, 117 aa, Artificial
  HIV Rev
  misc_feature (117)..(117): Xaa can be any naturally occurring amino acid
MAGRSGNADEELLRAVRTIKILYQSNPYPPPEGTRQARKNRRRRWRARQRQIRAISERILSTCLGRSAEPVPLQLPPIERLRLDCSEDCGTSGTQGVGSPQISVESSIVLGSGTKEX

SEQ ID NO: 1096 - protein, 124 aa, Artificial
  HIV Rev
  misc_feature (124)..(124): Xaa can be any naturally occurring amino acid
MAGRSGDADEGLLRAVRIIRILYQSNPYPPPEGSRQARRNRRRRWRARQRQVRAISERILSTCLGRPAEPVPLPLPPIERLCLDCSEDSGTSGTQQSQGTETGVGSSQTSVESSVILGSGTKEX

SEQ ID NO: 1097 - protein, 117 aa, Artificial
  HIV Rev
  misc_feature (117)..(117): Xaa can be any naturally occurring amino acid
MAGRSGDSDEELLKTIRLIKFLYQSNPPPSPEGTRQARRNRRRRWRERQRHIHSISEQILSTYLGRPEEPVLLHLPPLERLTLDCSEDCGTSGTQGVGSPQILVESPTVLDSGTKEX

SEQ ID NO: 1098 - protein, 117 aa, Artificial
  HIV Rev
  misc_feature (117)..(117): Xaa can be any naturally occurring amino acid
MAGRSGDSDEDLLKTIRLIKFLYQSNPPPNPEGTRQARRNRRRRWRERQRHIHSISQRILSTYLGRPEEPVPLHLPPLERLTLDCSEDCGTSGTQGVGSPQILVESPTVLDSGTKEX

SEQ ID NO: 1099 - protein, 118 aa, Artificial
  HIV Rev
  misc_feature (118)..(118): Xaa can be any naturally occurring amino acid
MAGRSGNIDEDLFKAARAIKILYQSNPYPNNPTGTRQARRNRRRRWRARQKQIHSLSERILATYLGRPAEPVPLQLPPLEKLTLNCSEDCGTSGDKGVGSPQVSVELPAVLGTGAKEX

SEQ ID NO: 1100 - protein, 116 aa, Artificial
  HIV Rev
  misc_feature (116)..(116): Xaa can be any naturally occurring amino acid
MAGRSGSNEDLLGSVGIVKILYQSNPYPNPTGTRKARRNRRRRWRARQKQIHSISERVLATYLGRPAEPVPLQLPPLEKLTLNCSEDCGTSGEKGVGSPQVSVEPPAVLGTGAKEX

SEQ ID NO: 1101 - protein, 118 aa, Artificial
  HIV Rev
  misc_feature (118)..(118): Xaa can be any naturally occurring amino acid
MAGRSGSTDEDLLKAVGIVKILYQSNPYPNNTAGTRQARRNRRRRWRARQNRIHSISERILAACLGRPAEPVPLQLPPIEKLTLDCSEDCGTSGDKGVGNPQVPVEPPAVLGTGDKEX

SEQ ID NO: 1102 - protein, 117 aa, Artificial
  HIV Rev
  misc_feature (117)..(117): Xaa can be any naturally occurring amino acid
MAGRSGDRDEDLLKAVRLIKILYQSNPLPSPEGTRQARRNRRRRWRARQRQINSIGERLLSTYLGRSEEPVPLQLPPLERLNLNCSEDCGTSGTQGVGSPQISVEPPAILESGTKEX

SEQ ID NO: 1103 - protein, 117 aa, Artificial
  HIV Rev
  misc_feature (117)..(117): Xaa can be any naturally occurring amino acid
MAGRSGDRDEDLLKAVRLIKFLYQSNPPPRPEGTRQARRNRRRRWRARQRQIRSIADRIVDTYLGRPEEPVPLQLPPLERLNLNCSEDCGTSGTQGVGSPQISVESPTVLESGAKEX

SEQ ID NO: 1104 - protein, 117 aa, Artificial
  HIV Rev
  misc_feature (117)..(117): Xaa can be any naturally occurring amino acid
MAGRSGDSDDRLLLAVRIIKILYQSNPYPKPNGSRQARRNRRRRWRARQNQIDSISERVLSTCLGRSAEPVPLQLPPIERLRLDCSEDCGNSGTQGVGNPQISGEPDMLLGTGTTEX

SEQ ID NO: 1105 - protein, 117 aa, Artificial
  HIV Rev
  misc_feature (117)..(117): Xaa can be any naturally occurring amino acid
MAGRSGDNDEQLLLAVRIIKILYQNNPYPKPNGGRQARRNRRRRWRARQNQIDSISERILSTCLGRPTEPVPFQLPPIERLRLDCSEDCGNSGTQGVGDPQIPGEPGVVLGTGTKEX

SEQ ID NO: 1106 - protein, 117 aa, Artificial
  HIV Rev
  misc_feature (117)..(117): Xaa can be any naturally occurring amino acid
MAGRSGDNDEQLLLAVRTIKILYQSNPYPKPSGSRQARRNRRRRWRARQKQIDSISERILSTCLGRSAEPVPLQLPPIERLRLDCSEDCGNSGTQGVGDPQIPVEPGVLLGTGTKEX

SEQ ID NO: 1107 - protein, 117 aa, Artificial
  HIV Rev
  misc_feature (117)..(117): Xaa can be any naturally occurring amino acid
MAGRSGDSDEQLLWAVRVIKILYQSNPYPKLSGSRQARRNRRRRWRARQNQIDSISERILSSCLGRSEEPVPLQLPPIERLRLDCTEDCGNSGTQGVGDPQIPGEPGVLLGTGTKEX

SEQ ID NO: 1108 - protein, 117 aa, Artificial
  HIV Rev
  misc_feature (117)..(117): Xaa can be any naturally occurring amino acid
MAGRSGDNDEQLLTAVKIIKILYQSNPQPNPTGSRQARRNRRRRWRARQNQIDSISQRILSDCLGRSEEPVPLQLPPIERLHLDCSEDCGNPGTQGVGDSQISGESDTVLGPRTEEX

SEQ ID NO: 1109 - protein, 117 aa, Artificial
  HIV Rev
  misc_feature (117)..(117): Xaa can be any naturally occurring amino acid
MAGRSGDSDAQLLAAARIIKILYQSSPYPKPAGTRQARRNQRRRWRARQNQLHSISQRILSTCLGRSEEPVPLPLPPIERLHLDCSEDCGNSGTQGVGESQIPGESSTVLGPRTEEX

SEQ ID NO: 1110 - protein, 117 aa, Artificial
  HIV Rev
  misc_feature (117)..(117): Xaa can be any naturally occurring amino acid
MAGRSGDSDEDLLTAVRLIKILYQSNPPPSPEGTRQARRNRRRRWRARQRYIHSIGERILSTYLGRSEEPVPLQLPPLERINLNCSEDCGTSGTQGVGSPQISVESPAILESRTEEX

SEQ ID NO: 1111 - protein, 118 aa, Artificial
  HIV Rev
  misc_feature (118)..(118): Xaa can be any naturally occurring amino acid
MAGRSGDSDEDLLKAVRLIKFLYQSNPPPSPEGTRQARRNRRRRWRARQRQIREIAERILGTYLGRPAEPVPLQLPPLERLNLNCSEDCRTSGTQGVGHPQISVESPTVLESGTEEQX

SEQ ID NO: 1112 - protein, 117 aa, Artificial
  HIV Rev
  misc_feature (117)..(117): Xaa can be any naturally occurring amino acid
MAGRSGDSDENLLKAIRLIKFLYQSNPPPSPEGTRQARRNRRRRWRARQRQIHSIGERIICTFLGRPEEPVPLQLPPLERLNLNCSEDCGTSGTQGVGSPQIPVEPPAVLESGTEEX

SEQ ID NO: 1113 - protein, 117 aa, Artificial
  HIV Rev
  misc_feature (117)..(117): Xaa can be any naturally occurring amino acid
MAGRSGDRDEELLQAVRLIKILYQSNPPPSPEGTRQARRNRRRRWRARQRQIHSIGERIISTYLGRFEEPVPLQLPPLERLNLNCSEDCGTSGTQGVGSHQISVESPAVLDSGTKEX

SEQ ID NO: 1114 - protein, 117 aa, Artificial
  HIV Rev
  misc_feature (117)..(117): Xaa can be any naturally occurring amino acid
MAGRSGDSDTELLKAVKCIKILYQSNPYPKPEGTRQARRNRRRRWRARQRQIRALSDRILSSCLGRSEEPVPLQLPPLERLHINCSEDCGQGPEEGVGSSQISGESHAVLESGTKEX

SEQ ID NO: 1115 - protein, 117 aa, Artificial
  HIV Rev
  misc_feature (117)..(117): Xaa can be any naturally occurring amino acid
MAGRSGDSDQELLKAVRYIKILYQSNPYPKPEGTRQARRNRRRRWRARQRQIREISDRILSSCLGRPAEPVPLQLPPLERLHINCSEDCGQGAEEGVGSSQISGESHTVLGSGTKEX

SEQ ID NO: 1116 - protein, 117 aa, Artificial
  HIV Rev
  misc_feature (117)..(117): Xaa can be any naturally occurring amino acid
MAGRSGDSDTELLKAVKYIKILYQSNPYPSPDGTRQARRNRRRRWRARQRQIRAISERILSSCLGRLEEPVPLQLPPLERLHINCSEDCGQGTEEGVGSPQISGEHHTVLESGTKEX

SEQ ID NO: 1117 - protein, 117 aa, Artificial
  HIV Rev
  misc_feature (117)..(117): Xaa can be any naturally occurring amino acid
MAGRSGDNDEELLRAVRAIKILYQSNPYPKPEGTRQARRNRRRRWRARQKQIRSISERILVACLGRPEEPVPLQLPPLERLHINCSKDCGQGTNEGVGNPQISMEPRTVLESGTKEX

SEQ ID NO: 1118 - protein, 117 aa, Artificial
  HIV Rev
  misc_feature (117)..(117): Xaa can be any naturally occurring amino acid
MAGRSGDRDEELLKAVRYIKILYQSNPYPKLEGTRKARRNRRRRWRARQRQIHQISERILSTCLGRLQEPVRLQLPLLEKLHINCSEDCGQGTEKGVGSPQISVESRAVLGSGTKEX

SEQ ID NO: 1119 - protein, 117 aa, Artificial
  HIV Rev
  misc_feature (117)..(117): Xaa can be any naturally occurring amino acid
MAGRSGDSDEELLKAVRLIKILYQSNPYPKPEGTRQARRNRRKRWRARQRQIHSISQRILSTCLGRPAEPVPFQLPPLERLNLDCSEDSREGAEGELGNPQIPVEPCAVLGSGTKEX

SEQ ID NO: 1120 - protein, 124 aa, Artificial
  HIV Rev
  misc_feature (124)..(124): Xaa can be any naturally occurring amino acid
MAGRSGSTDEELLTAVRIIKLLYQSNPSPPPEGTRQARRNRRRRWRARQRQIHSISERILSTCLGRPEEPVPLQLPPLERLHLDCSEDGGTSGTQQSQGTEIGVGSPQIFVESSVVLGSGTKEX

SEQ ID NO: 1121 - protein, 124 aa, Artificial
  HIV Rev
  misc_feature (124)..(124): Xaa can be any naturally occurring amino acid
MAGRSGDPDEELLRAVRIIKTLYQSNPYPSPAGTRQARKNRRRRWRARQRQIHSISERILSACLGRPAEPVPFQLPPLEGLSLDCSKDGGTSGTQQPQGTETGVGRPQVLVEPPVVLGSGTKEX

SEQ ID NO: 1122 - protein, 123 aa, Artificial
  HIV Rev
  misc_feature (123)..(123): Xaa can be any naturally occurring amino acid
MAGRSGSTDEELLRAVKAIKILYQSNPYPPPEGTRQARRNRRRRWRARQRQISAISERILTAYLGRPAEPVPLQLPPLERLHLDCSEDSGTSGTQQPQGTETGVGRSIFVESSVVLGQGTKEX

SEQ ID NO: 1123 - protein, 117 aa, Artificial
  HIV Rev
  misc_feature (117)..(117): Xaa can be any naturally occurring amino acid
MAGRSGDNDEGLLRACRIIRLLYQSNPYPEPAGTRQAQRNRRRRWRARQRQIHSIGERVLATCLGGPAEPVPLQLPPLERLTLDCSEDCGTSGEKGVGSPQTSGESPAVLGTGAKEX

SEQ ID NO: 1124 - protein, 117 aa, Artificial
  HIV Rev
  misc_feature (117)..(117): Xaa can be any naturally occurring amino acid
MAGRSGAGDEQLPQVCKIIKIIYQSNPYPEPAGTRQARRNRRRRWRARQRQIRAISERILTDCLGRPPEPVPLQLPPLERLTLDCNKDCGTSGEKGKGGPQIPVESSTVLGTGTKEX

SEQ ID NO: 1125 - protein, 117 aa, Artificial
  HIV Rev
  misc_feature (117)..(117): Xaa can be any naturally occurring amino acid
MAGRSGASDTELLQVCKIIKILYQSNPCPEPTGTRQARRNRRRRWRARQRQIREISERILTSCLGRPPEPVTLQLPPLERLTLNCSEDCGTSGEKGEGSPQISLESSTILGTGTKEX

SEQ ID NO: 1126 - protein, 117 aa, Artificial
  HIV Rev
  misc_feature (117)..(117): Xaa can be any naturally occurring amino acid
MAGRSGDNDDQLLLAVRIIKILYQSNPYSKPNGSRQARRNRRRRWRARQNQIDSISERILSSCLGRPAEPVPLQLPPIERLRLDCSEDCGNSGTQGVGDPQISGEPCMVLGAGTKEX

SEQ ID NO: 1127 - protein, 117 aa, Artificial
  HIV Rev
  misc_feature (117)..(117): Xaa can be any naturally occurring amino acid
MAGRSGDSDDQLLLAVRLIKILYQSNPYPKPNGSRQARRNRRRRWRARQNQIDSISERIPSSCLGRPAEPVPLQLPPIERLRLDCSEDCGNSGTQGVGDPQISGEPCMVLGAGTKEX

SEQ ID NO: 1128 - protein, 117 aa, Artificial
  HIV Rev
  misc_feature (117)..(117): Xaa can be any naturally occurring amino acid
MAGRRGDSEQQLLTPVRIIKILYQSNPYPKPEGTRQARRNRRRRWRARQRQIREISQRVLSSCLGRSTEPVPLQLPPLERLSLNCDEDSGQGTEGELGSPQIPVEPDTVLGSGDKEX

SEQ ID NO: 1129 - protein, 117 aa, Artificial
  HIV Rev
  misc_feature (117)..(117): Xaa can be any naturally occurring amino acid
MAGRRGDPDEQLLTTVRTIKILYESNPYPNLEGSRQTRRNRRRRWRARQKQISSISERLLSACLGRSAEPVPLQLPPIEKLNLNCDEDPGKGTEGGLGSPQISVEPCTVLESGTKEX

SEQ ID NO: 1130 - protein, 123 aa, Artificial
  HIV Rev
  misc_feature (123)..(123): Xaa can be any naturally occurring amino acid
MAGRSGVNDEELLRAVRVIKILYQSNPYPNSKGTRQARRNRRRRWRARQRQIRAISERILSSCLGGPPEPVDLPLPPLDRLTLDTEEDSGTPGTESQQGTATTETQNTLVGNTCILGKRVKGX

SEQ ID NO: 1131 - protein, 121 aa, Artificial
  HIV Rev
  misc_feature (121)..(121): Xaa can be any naturally occurring amino acid
MAGRSEDDQLLQAIQIIKILYQSNPQPSPRGSRNARKNRRRRWRRRQAQVDTLAARVLATVVHGPQNNNIVDLPPLEQLSIRDPEGDQLSEAWTVDPRAEDNCLQNLCSCNTILATRIAEX

SEQ ID NO: 1132 - protein, 121 aa, Artificial
  HIV Rev
  misc_feature (121)..(121): Xaa can be any naturally occurring amino acid
MAGRSEEDQQLLQAIQIIKILYQSNPCPTPAGSRNARKNRRRRWRRRQAQVDSLATRILATVVHGSQDNNLVDLPPLEQLNIRDPEADRLPGTGTVDPGTKDNSLTLWSCNAILATRIEKX

SEQ ID NO: 1133 - protein, 122 aa, Artificial
  HIV Rev
  misc_feature (122)..(122): Xaa can be any naturally occurring amino acid
MAGRSDGDQPLLRAIQIIKILYQSNSHTSPTGSRSARRNRRRRWRTRHAHVDTLAARILATVVHGPQDNNLVELPPLEQLSIRDPDGDQPSGTWTVDSGTEDNCLQTLHSCNTILATRVAEX

SEQ ID NO: 1134 - protein, 123 aa, Artificial
  HIV Rev
  misc_feature (123)..(123): Xaa can be any naturally occurring amino acid
MAGRSDGDQPLLRAIQIIKILYQSNPHPSPTTGSTSARRNRRRRWRKRQAQIDTLAARILATVVHGPQDNNLVELPPLEQLSIRDPDGDQPSGTWTVDPGTEDNCLQNLHSCNTILATRVAEX

SEQ ID NO: 1135 - protein, 112 aa, Artificial
  HIV Rev
MAGRSGESDEELLRAVRIIKILYQSNPPPNPEGTRQARKNRRRRWRRRQQQIRSISERILSTCLGRPAEPVHLQLPPLERLNLDCSKGTATGVGSTQIPGESCAVLGSGTKE

SEQ ID NO: 1136 - protein, 101 aa, Artificial
  HIV Tat
MEQVDPNLEPWNHPGSQPKTPCNKCFCKSCSYHCLVCFQTKGLGISYGRKKRRQRRHAPPGSKDHQNPISKQPLPQTRGDPTGSEESKKKVESKTETDPFD

SEQ ID NO: 1137 - protein, 101 aa, Artificial
  HIV Tat
MDPVDPNLEPWNHPGSQPKTACNNCYCKYCSYHCLVCFQKKGLGISYGRKKRGQRRNAPPSSEDHQDLISKQPLSQTRGDPTGSEESKKKAESKTKTDQFD

SEQ ID NO: 1138 - protein, 101 aa, Artificial
  HIV Tat
MEPVDPNLEPWNHPGSQPKTACNSCYCKHCCYHCRVCFLTKGLGISYGRKKRRQRRSAPPSGEDHQSSLPKQPLPQARGNPTGSEESKKKVESKTKTDQFD

SEQ ID NO: 1139 - protein, 101 aa, Artificial
  HIV Tat
MDPVDPKLEPWNHPGSQPKTACNTCYCKKCCYHCQVCFLNKGLGISYGRKKRRQRRSAPPSSKDHQDPLSKQPLSQTRGDPTGSKESKKKVESKTEADPCD

SEQ ID NO: 1140 - protein, 101 aa, Artificial
  HIV Tat
MEPIDPNLEPWNHPGSQPSTACNKCYCKQCCYHCPACFLTKGLGISYGRKKRRQRRSTPPSSKDHQNPVSKQPLPRTQGNSTGSEESKKKVESKTETDPFD

SEQ ID NO: 1141 - protein, 101 aa, Artificial
  HIV Tat
MEPVDPKLEPWNHPGSQPTTPCTTCFCKVCSYHCLVCFQTKGLGIYYGRKKRRQRRSAPPSNKEHQDPIPKQPLPRTPGDPTGPEESKKKVESKTKTDPFD

SEQ ID NO: 1142 - protein, 101 aa, Artificial
  HIV Tat
MEPIDPNLEPWNHPGSQPKTACNKCYCKSCSYHCLVCFQKKGLGISYGRKKRRQRRSGPPSNKDHQNLVSKQPLSQTQRDPTGSEESKKKVESKTETDRFD

SEQ ID NO: 1143 - protein, 100 aa, Artificial
  HIV Tat
MEPVDPNLEPWNHPGSQPKTPCTKCYCKLCSYHCLVCFQTKGLSISYGRKKRRQRRSTPPSSEDHQDLISKQPLPRTQGDPTGSEESKKKVESKTETDPD

SEQ ID NO: 1144 - protein, 101 aa, Artificial
  HIV Tat
MEPVDPNLEPWNHPGSQPKTPCTKCYCKKCSYHCLVCFQTKGLGISYGRKKRRQRRSGPPSSEDHQNPISKQPLSQTRGDPTGSKESKKKVESKTETDPFD

SEQ ID NO: 1145 - protein, 101 aa, Artificial
  HIV Tat
MEPVDPSLEPWNHPGSQPKTPCNHCYCKHCSYHCLVCFQRKGLGISYGRKKRRRRRSAPPSSEDHQNPISKQPLSQTRGDPTGSEESKKKVESKTETDPFD

SEQ ID NO: 1146 - protein, 100 aa, Artificial
  HIV Tat
MEPVDPNLEPWKHPGSQPKTACNTCYCKRCSYHCPVCFLTKGLGISYGRKKRRQRRRAPPSSEDHQNPIPKQPLSRTQGDPTGSEESKKKVESKTETDPD

SEQ ID NO: 1147 - protein, 101 aa, Artificial
  HIV Tat
MEPVDPNLEPWNHPGSRPKTACNKCYCKRCSYHCLVCFQTKGLGISYGRKKRGQRRSAPSSSEDHQDNISKQPLPRTQGDPTGSEESKKKVESKTETDPYD

SEQ ID NO: 1148 - protein, 101 aa, Artificial
  HIV Tat
MEPVDPNLEPWNHPGSQPQTPCNKCYCKRCSYHCLVCFQTKGLGISYGRKKRRQRRSAPPSSEDHQNPISKQPFPQTRGDSTGSEESKKKVESKTETNPFD

SEQ ID NO: 1149 - protein, 101 aa, Artificial
  HIV Tat
MEPIDPKLEPWNHPGSQPNTPCTPCYCKKCSYHCLVCFQTKGLGIYYGRKKRRQRRSAPPSSKDHQNPLSKQPLPRTPGNSTGSEESKKKVESKTEADQFD

SEQ ID NO: 1150 - protein, 101 aa, Artificial
  HIV Tat
MEPVDPKLEPWNHPGSQPKTPCNKCYCKKCSYHCLVCFQTKGLGISYGRKKRGQRRSTPPSNKAHQNLISKQPLPRTQGDSTGSEESKKKVESKTEADRFD

SEQ ID NO: 1151 - protein, 103 aa, Artificial
  HIV Tat
MEIVDPNLDPWDHPGSQPSTPCNKCYCKYCSYHCLVCFQTKGLGISYGRKKWRQRRGRSAPSSSKDHQDLISKQPLPQTRGDPTSSKESKKKVESKTETDPFD

SEQ ID NO: 1152 - protein, 101 aa, Artificial
  HIV Tat
MEPIDPNLEPWNHPGSQPKTACNKCFCKRCCYHCPACFLTKGLGISYGRKKRRQRRSAPPGSEDHQNPISKQPLPQTRGNPTGSEESKKKVESKTERDPFD

SEQ ID NO: 1153 - protein, 101 aa, Artificial
  HIV Tat
MEPVDPNLEPWNHPGSQPKTACSPCYCKNCSYHCLVCFQTKGLGISYGRKKRRQRRSAPPSSEDHQDPISKQPLPQTRGDPTGSEEPKKKVESKTTTDPFD

SEQ ID NO: 1154 - protein, 101 aa, Artificial
  HIV Tat
MEPVDPNLEPWKHPGSQPKTACTSCYCKRCSYHCLVCFQTKGLGISYGRKKRRQRRSAPPSSEDHQNHISKQPLPQTRGDQTGSEESKKKVESKTETDPYD

SEQ ID NO: 1155 - protein, 101 aa, Artificial
  HIV Tat
MEPVDPNLEPWNHPGSQPKTACNQCYCKHCCYHCLVCFQTKGLGISYGRKKRRQRRRSPQSSEAHQDPISKQPLPQARGDPTGSEESKKKVESKTKTDPFD

SEQ ID NO: 1156 - protein, 101 aa, Artificial
  HIV Tat
MEPVDPKLEPWNHPGSQPRTPCNKCFCKVCSYHCQSCFLTKGLGISYGRKKRGQRRSAPSSSEDHQNPIPKQPLPRTQGNSTGSEESKKKVESKTETDRFD

SEQ ID NO: 1157 - protein, 101 aa, Artificial
  HIV Tat
MDPVDPNLEPWNHPGSQPKTPCNNCYCKKCSYHCVVCFQTKGLGIYYGRKKRRQRRSAPPSNKDHQNPISKQPLPRTQGNSTGSEESKKKVESKTKTDQFD

SEQ ID NO: 1158 - protein, 101 aa, Artificial
  HIV Tat
MELIDPKLEPWNHPGSQPAAPCNNCYCKHCSYHCLVCFQTKGLGISYGRKKRRQRRSTPPRSEDHQNLILKQPLPRTQGNPTGPEESKKKVESKTKADPFD

SEQ ID NO: 1159 - protein, 102 aa, Artificial
  HIV Tat
MEPIDPNLEPWNHPGSQPKTPCNKCYCKHCSYHCLVCFQNKGLGISYGRKKRRQRRSAPPSSEDHQNLISKQPLPRTPGNSTGSEESKKKVGSKAETDQFDY

SEQ ID NO: 1160 - protein, 101 aa, Artificial
  HIV Tat
MEPVDPNLEPWNHPGSQPNTACNKCYCKQCSYHCLVCFQKKGLGISYGRKKRRQRRSAPPSSEDHQNPISKQPLSQTRGDSTGSEESKKKVESKTETDPFA

SEQ ID NO: 1161 - protein, 101 aa, Artificial
  HIV Tat
MEPVDPNLEPWNHPGSQPKTACNSCYCKKCSYHCQVCFLTKGLGISYGRKKRRQRRSAPPSSEDHQNLISKRPLPQTRGNQTGSEESKKKVESKTERDPFA

SEQ ID NO: 1162 - protein, 102 aa, Artificial
  HIV Tat
MEPVDPNLEPWNHPGSQPKTPCNKCYCKQCSYHCPVCFLTKGLGIYYGRKKRRQRRSAPSSSENHQNPVSKQPLPQARGNSTGSEESKKKVESKTETDPFDW

SEQ ID NO: 1163 - protein, 101 aa, Artificial
  HIV Tat
MEPVDPNLEPWNHPGSQPKTACNNCYCKHCSYHCLVCFQTKGLGIYYGRKKRRQRRSAPPSSEDHQNLISKQPLPRTQGDPTGSEESKKKVESKTKTDPFD

SEQ ID NO: 1164 - protein, 101 aa, Artificial
  HIV Tat
MEPIDPNLEPWNHPGSQPKTACNKCYCKHCSYHCLVCFQTKGLGISYGRKKRRQRRSTPPSSEDHQNPVSKQPLSQTRGDPTGSEESKKKVESKTEADPFD

SEQ ID NO: 1165 - protein, 101 aa, Artificial
  HIV Tat
MEPVDPNLEPWKHPGSQPRTACTKCYCKYCCYHCLVCFQTKGLGISYGRKKRRQRRSTPPSSESHQNLISEQPLPRTQGNPTGSEESKKKVESKTEADPFA

SEQ ID NO: 1166 - protein, 101 aa, Artificial
  HIV Tat
MEPVDPKLEPWNHPGGQPKTPCNTCYCKKCSYHCLVCFQKKGLGIYYGRKKRRQRRSAPSSSEDHQDPISKQPFPRTQGESTGSEESKKEVESKTETDQFD

SEQ ID NO: 1167 - protein, 101 aa, Artificial
  HIV Tat
MEQVDPNLEPWNHPGSQPKTPCNNCYCKYCSYHCLVCFQTKGLGISYGRKKRRQRRSAPPSSKDHQNPVSKQPLPQTRGDPTGSKESKRKVENKTETDQFD

SEQ ID NO: 1168 - protein, 101 aa, Artificial
  HIV Tat
MEPVDPNLEPWNHPGSQPKIACNKCYCKACCYHCLVCFQTKGLGISYGRKKRRQRRSAPPSSEDHQDLVPKQPLSQARGNPTSSKESKKKVESKTETDPFD

SEQ ID NO: 1169 - protein, 101 aa, Artificial
  HIV Tat
MEPVDPKLEPWNHPGSQPKTPCTKCFCKGCSYHCLVCFQTKGLGISYGRKKRGQRRSAPPRSEDHQNLISKQPLPRTQGDSTGSEESKKKVESKTETDRFD

SEQ ID NO: 1170 - protein, 101 aa, Artificial
  HIV Tat
MEPVDPKLEPWNHPGSQPKTACNKCYCKRCSYHCLVCFQTKGLGISYGRKKRRQRRSAPPSSEDHQNPISKQPLPQTQGDPTGSEESKKKVESKTETDPCD

SEQ ID NO: 1171 - protein, 101 aa, Artificial
  HIV Tat
MDPVDPSLEPWNHPGSQPKTACNTCYCKKCCYHCQVCFLNKGLGISYGRKKRRQRRSAPPSNGDHQNPISKQPLPQTRGDPTGSKESKKEVESKTEADPFD

SEQ ID NO: 1172 - protein, 101 aa, Artificial
  HIV Tat
MEPVDPNLEPWKHPGSQPETPCNKCYCKSCSYHCLVCFQKKGLGISYGRKKRRQRRSAPPSSEDHQDLVSKQPLPQTRGDPTGSKESKKKVESKTKTDQFD

SEQ ID NO: 1173 - protein, 101 aa, Artificial
  HIV Tat
MEPVDPNLEPWNHPGSQPKTACNNCCCKRCSYHCLVCFQKKGLGISYGRKKRGQRRSAPPSSKDHQNPVSKQPLPQTRGNSTGSEESKKKVESKTETDPFD

SEQ ID NO: 1174 - protein, 101 aa, Artificial
  HIV Tat
MEPVDPNLEPWNHPGSQPKTACNNCYCKRCCYHCQRCFLTKGLGISYGRKKRRQRRSAPPSCKDHQNPLPEQPSTQTRGDSTGSEESKKKVESKTKAHPFD

SEQ ID NO: 1175 - protein, 101 aa, Artificial
  HIV Tat
MEPVDPNLEPWNHPGSQPKTSCNNCYCKKCSYHCLVCFQKKGLGISYGRKKRRQRRSAPASSEDHQDLISKQLLPQTRGDPTGSKESKKKVESKTETDQFD

SEQ ID NO: 1176 - protein, 101 aa, Artificial
  HIV Tat
MDPVDPKLEPWNHPGSQPSTPCNTCFCKKCSYHCLVCFQKKGLGIYYGRKKRRQRRSTPPSSKDHQNPVSKQPTSRTQGDWTGSIESEKKVESKTDTDQFA

SEQ ID NO: 1177 - protein, 101 aa, Artificial
  HIV Tat
MEPIDPNLEPWNHPGSQPKTACNKCHCKRCCYHCTVCFLTKGLGISYGRKKRRRRRKAPPSSEDHQNLVSKQPLPQSRGNPTGSEESKKKVESKTETDPCA

SEQ ID NO: 1178 - protein, 101 aa, Artificial
  HIV Tat
MEPIDPNLEPWNHPGSQPKTDCNKCYCKRCCYHCLVCFQKKGLGISHGRKKRRQRRSAPPSSKDHQNPIPKQPLPQTRGDQTGSEESKKKVESKTETDQFD

SEQ ID NO: 1179 - protein, 102 aa, Artificial
  HIV Tat
MEPVDPNLEPWNHPGSQPRTACNTCYCKKCSYHCLVCFQKKGLGISYGRKKRSQRRSTPPSSEDHQDPISKQPLPQQPRGIPTGSEESKKKVESKTETDPFD

SEQ ID NO: 1180 - protein, 101 aa, Artificial
  HIV Tat
MEPVDPNLEPWNHPGSQPKTACNKCYCKHCSYHCLVCFQTKGLGISYGRKKRRQRRSAPPSSEDHQNLISKQPLSQTRGDPTGPEESKKKVESKTETDPFD

SEQ ID NO: 1181 - protein, 101 aa, Artificial
  HIV Tat
MEPVDPNLEPWNHPGSQPKTACNKCYCKSCSYHCPVCFLSKGLGISYGRKKRRPRRSAPPSNKDHQDLVSKQPLPQTRGDPTGSEESKKKVESKTETDPFD

SEQ ID NO: 1182 - protein, 102 aa, Artificial
  HIV Tat
MEPVDPNLEPWNHPGSQPKTPCTTCFCKRCSYHCLVCFQTKGLGIYYGRKKRGQRRRSTPSSSKDHQDLVPKQPLPRTQGNSTGSEESKKKVESKTETDQFA

SEQ ID NO: 1183 - protein, 101 aa, Artificial
  HIV Tat
MEPVDPNLEPWNHPGSQPSTACNKCYCKHCSYHCLVCFQTKGLAISYGRKKRRQRRSAPPSSEDHQNLVSKQPLPQAQGDPTGSEESKKKVESKTEPDPCD

SEQ ID NO: 1184 - protein, 101 aa, Artificial
  HIV Tat
MEPVDPNLEPWNHPGSQPETPCNKCFCKACSYHCLVCFQKKGLGISYGRKKRRQRRSAPPSSTDHQTPISKQPLPQTRGDQTGSEKSKKKVESKTETDPFD

SEQ ID NO: 1185 - protein, 101 aa, Artificial
  HIV Tat
MDPVDPNLEPWNHPGSQPKTACNRCYCKKCSYHCLVCFHTKGLGISYGRKKRRQRRSAPPSSEDHQNPISKQPLPRTQGDSTGSEESKKKVESKTEADRFD

SEQ ID NO: 1186 - protein, 101 aa, Artificial
  HIV Tat
MEPVDPNLEPWNHPGSQPKTACNNCYCKKCCYHCQRCFLNKGLGISYGRKKRRPRRGPDQGNTDHQNPVPKQSLPQTQRDSTGPEESKKKVESKAETDRFD

SEQ ID NO: 1187 - protein, 101 aa, Artificial
  HIV Tat
MEPVDPKLEPWNHPGSQPKTACTKCYCKRCCYHCQLCFINKGLGISYGRKKRRPRRKPSPSNKDHQNPIPKQSLPQAQRVPTGPEEPKKEVESKAETDRFD

SEQ ID NO: 1188 - protein, 101 aa, Artificial
  HIV Tat
MDPVDPNLEPWNHPGSQPRTACNKCYCKRCCYHCPVCFLNKGLGISYGRKKRRPRRRPPQGGTGHQNPIPEQSLPRPQRIPTGTEESKTEVESKAETDPCD

SEQ ID NO: 1189 - protein, 100 aa, Artificial
  HIV Tat
MDPVDPNLEPWNHPGSQPKTACNKCYCKACCWHCQVCFLNKGLGISYGRKKRKHRRGAPPGSKDHQNPIPKQPLPTTRGNPTGPKESKKEVASKTETDPD

SEQ ID NO: 1190 - protein, 101 aa, Artificial
  HIV Tat
  misc_feature (1)..(1): Xaa can be any naturally occurring amino acid
  misc_feature (11)..(11): Xaa can be any naturally occurring amino acid
  misc_feature (14)..(15): Xaa can be any naturally occurring amino acid
  misc_feature (21)..(21): Xaa can be any naturally occurring amino acid
  misc_feature (66)..(66): Xaa can be any naturally occurring amino acid
  misc_feature (84)..(84): Xaa can be any naturally occurring amino acid
  misc_feature (91)..(91): Xaa can be any naturally occurring amino acid
XDPVDPNLEPXNHXXSQPKTXCRNCYCKKCCWHCQICFLKKGLGISYGRKKRRHRRGTSHSSKDHXIPISKQPLPHTQKDQTGXEESKKKXESKAETDQFD

SEQ ID NO: 1191 - protein, 101 aa, Artificial
  HIV Tat
MDPVDPNLEPWNHPGSQPTTACNKCYCKKCCYHCQVCFLNKGLGISYGRKKRRQRRGAPQSSKDHQNSIQKQPIPQTQGVSTGPKESKKKMESKAEADRFD

SEQ ID NO: 1192 - protein, 101 aa, Artificial
  HIV Tat
MDPVDPNLEPWNHPGSQPSTACNKCYCKICCYHCPVCFLNKGLGISYGRKKRTRRRGAPQSNKDHQNPISKQPIPQTQGDSTGPEESKKKVESKAETDRFD

SEQ ID NO: 1193 - protein, 101 aa, Artificial
  HIV Tat
MDPVDPNLEPWNHPGSQPTTPCSKCYCKKCCYHCIVCFQNKGLGISYGRKKRRQRRRTPQSSKDHQNPIPKQPIPQTQGVSTGPEESKKKVESKAEADRFD

SEQ ID NO: 1194 - protein, 101 aa, Artificial
  HIV Tat
MDPVDPNLEPWNHPGSQPTTACNKCYCKKCCYHCQACFLNKGLGISYGRKKRKQRRGAPQSNKDHQNPIQQQSIPQTQGIPTGPEESKKKVESKAETDRFD

SEQ ID NO: 1195 - protein, 101 aa, Artificial
  HIV Tat
MEPVDPNIEPWNHPGSQPTTPCTKCYCKKCCYHCPACFLNKGLGISYGRKKRKQRRGTPQGNKDHQNPIPKQSTPQTQGISTGPEESKKKVESKTEADRFD

SEQ ID NO: 1196 - protein, 101 aa, Artificial
  HIV Tat
MDPVDPNLEPWNHPGSQPATACSACYCKKCCYHCPVCFLNKGLGISYGRKKRRQRRRTPQSSKDHQNPVPKQSIPQAQGDSTGPEESKKKVESKTETDRFA

SEQ ID NO: 1197 - protein, 101 aa, Artificial
  HIV Tat
MDPVDPNLEPWNHPGSQPTTPCNKYFCKRCCYHCLVCFQHKGLGISYGRKKRRQRRGTPQSSKDHQDPIPKQSIPPAQGIPTGPEESKKKVESKAETDRFA

SEQ ID NO: 1198 - protein, 101 aa, Artificial
  HIV Tat
MEPVDPNLEPWKHPGSQPTTACSNCYCKVCCWHCQLCFLKKGLGISYGKKKRKPRRGPPQGSKDHQTLIPKQPLPQSQRVSAGQEESKKKVESKAKTDRFA

SEQ ID NO: 1199 - protein, 101 aa, Artificial
  HIV Tat
MDPVDPSLEPWNHPGSQPKTPCNKCYCKVCCYHCQCCFLNKGLGISYGRKKRKPRRGTPQSNKDHQNPIPKQPIPRTQGDSTGPEESKKKVESKTEADRYA

SEQ ID NO: 1200 - protein, 101 aa, Artificial
  HIV Tat
MEPVDPNLEPWNHPGSQPRTACNNCYCKRCSYHCLVCFQKKGLGISYGRKKWRQRRRAPPSSEDHQNLISKQPIPQTQGDSTGPEESKKKMESKAKTDRFD

SEQ ID NO: 1201 - protein, 101 aa, Artificial
  HIV Tat
MEPVDPKLEPWNHPGSQPKTACNNCYCKHCSYHCLVCFQAKGLGISYGRKKRRQRRNAPPSSEDHQNPISKQPLSQTRGDPTGSEESKKKVESKTEADPFD

SEQ ID NO: 1202 - protein, 101 aa, Artificial
  HIV Tat
MEPIDPNLEPWNHPGSQPKTACNRCYCKRCSYHCLVCFQTKGLGISYGRKKRRQRRSAPPSSKDHQNPISKQSIPQTQGDPTGPEEPKKKVESKTETDRFD

SEQ ID NO: 1203 - protein, 101 aa, Artificial
  HIV Tat
MDLVDPNLEPWNHPGSQPTTPCSKCYCKKCCYHCQHCFITKGLGISYGRKKRRQRRGPPQSNKDHQNPVQKQPIPQTQRESTGPEESKKKVESKAETDRFD

SEQ ID NO: 1204 - protein, 101 aa, Artificial
  HIV Tat
MEPVDPKLEPWNHPGSQPKTACNKCFCKKCSYHCLVCFQTKGLGISYGRKKRSQRRRAPPSSEDRQNLISKQPLSQTRGDPTGPEKSKKEVESKTETHPLA

SEQ ID NO: 1205 - protein, 101 aa, Artificial
  HIV Tat
  misc_feature (57)..(57): Xaa can be any naturally occurring amino acid
MDPVDPSLEPWNHPGSQPTTPCTKCYCKKCCYHCQVCFITKGLGISYGRKKRRQRRXTPEGGQAHQDPIPKQPSSQPRGDPTGPKEKKKVASKAEADQFDW

SEQ ID NO: 1206 - protein, 101 aa, Artificial
  HIV Tat
MDPVDPNLEPWNHPGSQPTTPCSKCYCKKCCYHCQSCFLNKGLGISYGRKKRKQRRGAPPSSKDHQNPIPKQPIPQTQGISTGPKESKKEVESKTEPDRFD

SEQ ID NO: 1207 - protein, 101 aa, Artificial
  HIV Tat
  misc_feature (95)..(95): Xaa can be any naturally occurring amino acid
MDPVDHNLEPWNQPGSQPNTPCNNCYCKQCCYHCQLCFLRKGLGISYGRKKRRPRRRPPKSSQDHQDFIPKQPLSRTHGEPTGPKEKKKVASKTXTDPFDW

SEQ ID NO: 1208 - protein, 102 aa, Artificial
  HIV Tat
MDPVDPNLEPWNHPGSQPRTPCNKCYCKKCCYHCQMCFITKGLGISYGRKKRRQRRRPPQGNQAHQDPLPEQPSSQHRGDHPTGPKEKKKVESKAEADQFDW

SEQ ID NO: 1209 - protein, 101 aa, Artificial
  HIV Tat
MDPVDPNLEPWNHPGSQPKTACNKCYCKKCCWHCQVCFLNKGLGISYGRKNRKHRRGTPQGSKDHQNPVPKQSLPLIRGIPTGPEESKKEVASKTETHPGD

SEQ ID NO: 1210 - protein, 101 aa, Artificial
  HIV Tat
MELVDPSLEPWNHPGSQPTTACNKCYCKICCWHCQLCFLNKGLGISYGRKKRRRRRGTPQSHQDHQNPVPKQPLPTTRGNPTGPKESKKEVESKTETDQCA

SEQ ID NO: 1211 - protein, 101 aa, Artificial
  HIV Tat
MDPVDPNIEPWNQPGSQPKTACNQCYCKRCCYHCQHCFLKKGLRISYGRKKRSQRRRAPKSSPDHQNLVPKQPFSRTNGNPTGPKEKKKVASKAEADPFDW

SEQ ID NO: 1212 - protein, 102 aa, Artificial
  HIV Tat
MEPVDPNLEPWNQPGSQPQTACNNCYCKKCCFHCQVCFSSKGLGISYGRKKRRQRRGTPQDRKDHQNPVPRQPLPTTRGNPTGPKESKKEVESKTETDPFAW

SEQ ID NO: 1213 - protein, 101 aa, Artificial
  HIV Tat
MEPVDPNIEPWNQPGSQPKTACTPCYCKKCCFHCQVCFLKKGLGISYGRKKRRQRRTAPPGNKNHQDLVQEQPLSQTQRKSTGPEESKKEVESKAKPDRFD

SEQ ID NO: 1214 - protein, 101 aa, Artificial
  HIV Tat
MDPVDPRLEPWKHPGSQPKTACTNCYCKQCCFHCQVCFIRKGLGISYGRKKRRQRRRAPEDSQTHQVSLSKQSAPQPRGDPTGPKESKKKVESKTETNPSD

SEQ ID NO: 1215 - protein, 101 aa, Artificial
  HIV Tat
MEPVDPRLEPWKHPGSQPKTACNNCYCKKCCLHCQVCFMKKGLGIFYGRKKRRQRRRAPQDSQTHQASLSKQPASQPRGDPAGPKESKKKVESETETDPRD

SEQ ID NO: 1216 - protein, 101 aa, Artificial
  HIV Tat
MEPVDPRLEPWEHPGSQPKTACTNCYCKKCCFHCQVCFTKKGLGISYGRKKRRQRRRAPEDSQTHQVSLSKQPASQPRGDPTGPKESKKKVETETETDPID

SEQ ID NO: 1217 - protein, 101 aa, Artificial
  HIV Tat
MEPVDPRLEPWKHPGSQPRTPCTNCYCKKCCLHCQVCFTRKGLSISYGRKKRRQRRRAPQDSQTHQVSLPKQPSSQQRGDPDSPKKSKKKVERETEADPFD

SEQ ID NO: 1218 - protein, 100 aa, Artificial
  HIV Tat
MEPVDPRLEPWKHPGSQPKTACTNCYCKKCCFHCQVCFITKALGISYGRKKRRQRRRAHQNSQTHQASLSKQPTSQPRGDPTGPKEKKKVERETETDPFD

SEQ ID NO: 1219 - protein, 101 aa, Artificial
  HIV Tat
MEPVDPRLEPWKHPGSQPKTASNNCYCKRCCLHCQVCFTKKGLGISYGRKKRRQRRRAPQDSKTHQVSLSKQPASQPRGDPTGPKESKKKVERETETDPED

SEQ ID NO: 1220 - protein, 101 aa, Artificial
  HIV Tat
MEPVDPRLEPWKHPGSQPRTACTNCYCKQCCFHCQVCFITKGLGISYGRKKRRQRRRTPQSSKTHQASLSKQPASQFQGDPTGPKESKKKVEGETETHPGD

SEQ ID NO: 1221 - protein, 102 aa, Artificial
  HIV Tat
MEPVDPRIEPWKHPGSQPRTACTNCYCKKCCFHCQVCFLRKGLGISYGRKKRRQRRRLPEDSQIHQVSLPKQPTSQPQGDPTGPKESKKKVESKTETDPSDW

SEQ ID NO: 1222 - protein, 101 aa, Artificial
  HIV Tat
MEPVDPRLEPWNHPGSQPKTACTKCYCKKCCLHCQVCFITKGLGISYGRKKRRQRRRAPPDSQTRQVSLSKQPTSQPRGDPTGPEESKKKVERETETDPVA

SEQ ID NO: 1223 - protein, 101 aa, Artificial
  HIV Tat
MEPVDPRLEPWKHPGSQPKTPCTKCYCKKCCLHCQVCFMTKGLGISYGRKKRRQRRRAPQDNKNHQVSLSKQPTSRARGDPTGQEESKEKVEKETVVDPVT

SEQ ID NO: 1224 - protein, 101 aa, Artificial
  HIV Tat
MEPVDPKLEPWKHPGSQPKTACNNCYCKKCCFHCQVCFTKKGLGISYGRKKRRQRRRSPQDSETHQVSLSKQPASQPRGDPTGPKESKKKVERETETDPVD

SEQ ID NO: 1225 - protein, 102 aa, Artificial
  HIV Tat
MDPVDPRLEPWKHPGSQPKTACTNCYCKKCCLHCQVCFMTKALGISNGRKKRRQRRRTPQNSQTHQADLSKQPTSQPRGDQTGQKESTKKVERETETDPNDQ

SEQ ID NO: 1226 - protein, 101 aa, Artificial
  HIV Tat
MEPVDPRLEPWKHPGSQPKTACTNCYCKKCCLHCQVCFITKGLGISYGRKKRRKRRRSPQHSQTDQASLSKQPASQPRGDPTGPKESKKKVETETETDPVH

SEQ ID NO: 1227 - protein, 101 aa, Artificial
  HIV Tat
MEPVNPSLEPWKHPGSQPKTACTNCYCKKCCFHCQACFITKGLGISYGRKKRRQRRRPPQDSQTHQVSLSKQPSSQPRGDPTGPKEQKKKVERETETDPVH

SEQ ID NO: 1228 - protein, 102 aa, Artificial
  HIV Tat
MEPVDPRLEPWKHPGSQPKTACNNCYCKKCCYHCQVCFLTKGLGISYGRKKRRQRRGPPQGSQTHQVSLSKQPTSQPRGDPTGPKESKEKVERETETDPAVQ

SEQ ID NO: 1229 - protein, 101 aa, Artificial
  HIV Tat
MEPVDPNLEPWKHPGSQPRTACNNCYCKKCCFHCYACFTRKGLGISYGRKKRRQRRRAPQDSQTHQASLSKQPASQSRGDPTGPTESKKKVERETETDPFD

SEQ ID NO: 1230 - protein, 101 aa, Artificial
  HIV Tat
MEPVDPRLEPWKHPGSQPKTACTTCYCKKCCFHCQVCFTKKALGISYGRKKRRQRRRAPEDSQTHQVSLPKQPAPQFRGDPTGPKESKKKVERETETHPVD

SEQ ID NO: 1231 - protein, 101 aa, Artificial
  HIV Tat
MEPVDPSLEPWKHPGSQPKTACTNCYCKKCCLHCQVCFTTKGLGISYGRKKRRQRRRPPQDSQTHQVSLPKQPSSQQRGDPTGPKESKKKVERETETDPDN

SEQ ID NO: 1232 - protein, 101 aa, Artificial
  HIV Tat
MEPVDPNLEPWKHPGSQPRTACNNCYCKKCCFHCQVCFTKKGLGISYGRKKRRQRRRPPQDSQTHQSSLSKQPTSQLRGDPTGPTESKKKVERETETDPVH

SEQ ID NO: 1233 - protein, 101 aa, Artificial
  HIV Tat
MEPVDPRLEPWKHPGSQPKTACTKCYCKKCCLHCQVCFMTKGLGISYGRKKRRQRRRAPQDSQTHQASLSKQPTSQPRGDPTGPKESKKKVERETETDPVD

SEQ ID NO: 1234 - protein, 101 aa, Artificial
  HIV Tat
MDPVDPRLEPWKHPGSQPKTACTNCYCKKCCFHCQVCFITKGLGISYGRKKRRQRRRAPPEGLTHQVPLSKQPSSQFRGDPTGPKESKKKVVRETETDPIA

SEQ ID NO: 1235 - protein, 101 aa, Artificial
  HIV Tat
MEPVDHRLEPWKHPGSQPKTACTNCYCKRCCFHCQVCFMTKGLGISYGRKKRRQRRRSPQNSQTHQDSLSKQPTSQPRGDPTGPKESKKKVERETETDPED

SEQ ID NO: 1236 - protein, 100 aa, Artificial
  HIV Tat
MEPVDPRLEPWKHPGSRPQTACNSCYCKKCCFHCQVCFTTKGLGISYGRKKRRQRHRTPQSSQLHQDPVPKQPASQAQGNPTGPKESKKEVESQAKTDPD

SEQ ID NO: 1237 - protein, 101 aa, Artificial
  HIV Tat
MEPVDPNLEPWNHPGSQPKTACNNCYCKRCSYHCLVCFQTKGLGISYGRKKRRQRRSAPPSSEDHQNPIPKQPLPQTRGDQTGSEESKKKVESKTETDPFD

SEQ ID NO: 1238 - protein, 101 aa, Artificial
  HIV Tat
MEPIDPNLEPWNHPGSQPKTACNKCFCKHCSYHCLVCFQTKGLSISYGRKKRRQRRSAPPSSEDHQNPVSKQPLPQTRGDPTGLEESKKKVESKTETDPFD

SEQ ID NO: 1239 - protein, 101 aa, Artificial
  HIV Tat
MEQVDPNLEPWNRPGSQPKTPCNNCYCKYCSYHCLVCFQTKGLGISYGRKKRRQRRSAPPSSKDHQNPVSKQPLPQTRGDPTGSKESKKKVESKTETDQFD

SEQ ID NO: 1240 - protein, 101 aa, Artificial; identical to SEQ ID NO: 1168
  HIV Tat

SEQ ID NO: 1241 - protein, 101 aa, Artificial; identical to SEQ ID NO: 1169
  HIV Tat

SEQ ID NO: 1242 - protein, 100 aa, Artificial
  HIV Tat
MEPVDPNLEPWNHPGSQPKTACNQCYCKKCSYHCLVCFLTGLGISYGRKKRRQRRRAPQSSKDHQNLISKQPLSHTRGDPTGSEESKKKVESKAETDPYA

SEQ ID NO: 1243 - protein, 101 aa, Artificial
  HIV Tat
MEPVDPNLEPWNHPGSQPKTACNQCYCKRCSYHCLVCFQKKGLGISYGRKKRRQRRSAPPSSEDHQNLISKQPLPRTQGDPTGSEESKKKVESKTKTDPFD

SEQ ID NO: 1244 - protein, 101 aa, Artificial
  HIV Tat
MEPVDPNLEPWNHPGSQPKTACNNCYCKHCSYHCLVCFQKKGLGISYGRKKRRQRRRAPQSSEDHQNLISKQPLPRTQGDPTGSEESKKKVESKAKTDPFA

SEQ ID NO: 1245 - protein, 101 aa, Artificial
  HIV Tat
MEPVDPNLEPWNHPGSQPRTACNNCFCKSCSYHCLVCFQKKGLGISYGRKKRRQRRSAPPSSEDHQNLISKQPLPRTQGDPTGSEESKKKVESKTKTDPFA

SEQ ID NO: 1246 - protein, 101 aa, Artificial
  HIV Tat
MEPIDPNLEPWNHPGSQPKTACNNCYCKHCSYHCLVCFQRKGLGISYGRKKRRQRRSAPQSSEDHQDLISKQPLPRTQGDPTGSEESKKKVEGKTTSDPFD

SEQ ID NO: 1247 - protein, 101 aa, Artificial
  HIV Tat
MEPVDPNLEPWNHPGSQPKTACNNCYCKKCSYHCLVCFQKKGLGISYGRKKRRQRRSAPQSSEDHQNPISKQPLPRTPGDPTGSEESKKKVESKTKTDPFD

SEQ ID NO: 1248 - protein, 101 aa, Artificial
  HIV Tat
MEPVDPSLEPWNHPGSQPTTACSKCYCKKCCWHCQLCFLKKGLGISYGRKKRKHRRGPPPGSKDHQNPIPKQPLPTTRGNPTGPKESKKEVAKKAKTDPFA

SEQ ID NO: 1249 - protein, 101 aa, Artificial
  HIV Tat
MEPVDPNLEPWKHPGSQPTTACSKCYCKMCCWHCQLCFLKKGLGISYGRKKRKHRRGPSQDSKDHQNSIPKQPLPTSRGNPTGPKESKKKVESKAETDPDW

SEQ ID NO: 1250 - protein, 101 aa, Artificial
  HIV Tat
MELVDPKLEPWNHPGSQPTTACNKCYCKICCWHCQLCFLKKGLGISYGRKKRKHRRGTPQGSKGHQDPISKQPLPIIRGNPTGPKESKKEVESKTKTDPCA

SEQ ID NO: 1251 - protein, 101 aa, Artificial
  HIV Tat
MELVDPNLEPWNHPGSQPTTACSKCYCKKCCWHCQLCFLKKGLGISYGRKKRKHRRGTPQSSKDHQNPIPKQPLPIIRRNPTDPKESKKEVASKAETDQCD

SEQ ID NO: 1252 - protein, 101 aa, Artificial
  HIV Tat
MELVDPNLEPWKHPGSQPSTACSKCYCKICCWHCQLCFLKKGLGISYGRKKRKHRRGTPQSRKDHQHPIPEQPLSIIRGNPTDPKESKKEVASKAETDPCD

SEQ ID NO: 1253 - protein, 101 aa, Artificial
  HIV Tat
MEPVDPNLEPWNHPGSQPTTACSKCYCKICCWHCQLCFLKKGLGISHGRKKRKHRRGTPQSSKDHQSPIPEQPLPIIRGNPTDPKESKKEVASKAETDPCD

SEQ ID NO: 1254 - protein, 102 aa, Artificial
  HIV Tat
MELVDPNLEPWNHPGSQPTTACSKCYCKKCCWHCQLCFLKKGLGISHGRKKRKHRRGTPQSRKDHQYPIPEQPLPIIRGGNPTDPKESKKEVASKAETDPCD

SEQ ID NO: 1255 - protein, 100 aa, Artificial
  HIV Tat
MELVDPNLEPWNHPGSQPTTACSKCYCKKCCWHCQLCFLKKGLGISHGRKKRKHRRGTPQSSKDHQTPIRKQPPSIIRGNPTDPKESKKKVESKAETDPD

SEQ ID NO: 1256 - protein, 101 aa, Artificial
  HIV Tat
MELVDPNLEPWNHPGSQPTTACSKCYCKKCCWHCQLCFLKKGLGISHGRKKRKHRRRTPQSSKDHQYPIPEQPSPIIRGIPTDPKESKKEVASKAETDQCD

SEQ ID NO: 1257 - protein, 101 aa, Artificial
  HIV Tat
MEPVDPSLEPWNHPGSQPTTACSKCYCKICCWHCQLCFLNKGLGISYGRKKRRRRRGTPQSRQDHQNPVPKQPLPTTRGDPTDPKESKKEVASKTETDQGD

SEQ ID NO: 1258 - protein, 101 aa, Artificial
  HIV Tat
  misc_feature (53)..(53): Xaa can be any naturally occurring amino acid
MEPVDPSLEPWNHPGSQPTTACSNCYCKICCWHCQLCFLNKGLGISYGRKKRXRRRGTPQSRQDRQNPVSKQPLPTTRGNPTGPKESKREVESKTKTDPCD

SEQ ID NO: 1259 - protein, 101 aa, Artificial
  HIV Tat
MELIDPSLEPWNHPGSQPTTACSKCYCKICCWHCQLCFLNKGLGISYGRKKRRRRRGTPQSHQDHQNPVSKQSLPQTRGDPTGPKESKKEVESKTETDPFA

SEQ ID NO: 1260 - protein, 100 aa, Artificial
  HIV Tat
MELVDPSLEPWNHPGSQPTTACSKCYCKMCCHCQLCFLNKGLGISYGRKKRRRRRGTPQSRQDHQNPVPKQPLPTTRGNPTDPKESKKEVESKTKTDPCD

SEQ ID NO: 1261 - protein, 101 aa, Artificial
  HIV Tat
MELVDPSLEPWNHPGSQPTTACSKCYCKICCWHCQLCFLNKGLGISYGRKKRKRRRGTPQSRQDNQDPVPKQPLPTTRGNPAGPKESKKEVAGKTETDPCD

SEQ ID NO: 1262 - protein, 101 aa, Artificial
  HIV Tat
MELVDPKLEPWNHPGSQPTTACSKCYCKLCCWHCQLCFLNKGLGISYGRKKRRRRRGTPQSRQDHQNPVPKQPLPTTRGEQTGPKESKKEVASKTETGPCD

SEQ ID NO: 1263 - protein, 100 aa, Artificial
  HIV Tat
MEPVDPRLEPWKHPGSQPKTACTNCYCKKCCLHCQVCFMKKGLGISYGRKKRRQRRRAPQDNQTDQVSLPKQPASQPRGDPTGPKEKKKMERETETHPFD

SEQ ID NO: 1264 - protein, 100 aa, Artificial
  HIV Tat
MEPVDPRLEPWKHPGSQPKTACTNCYCKKCCLHCQVCFMKKGLGISYGRKKRRQRRRPPQDNQTDQVSLPKQPASQPRGDPTGPKEKKKVERETETHPFD

SEQ ID NO: 1265 - protein, 102 aa, Artificial
  HIV Tat
MEPVDPDLEPWNHPGSQPTTDCNKCFCKKCCWHCQVCFLKKGLGISYGRKKRKHRRGSLQGSKGHQNLIPKQPLSQQPNGDSTGPEEQKKKVASKTEADPFA

SEQ ID NO: 1266 - protein, 104 aa, Artificial
  HIV Tat
MEAVDLVYPNLEPWNHPGSQPTTACNKCFCKKCCWHCQACFLKKGLGISYGRKKRKRNEDLLGFSRDRQNPIPKQPLSQPNGNPEGPKEQKKKVASKTEADPFD

SEQ ID NO: 1267 - protein, 102 aa, Artificial
  HIV Tat
MEPVDPNLEPWNHPGSQPTTACTKCFCKVCCYHCQVCFLRKGLGISYGRKKRKHRRRPPQGSRDRQNPIPKQPLSQQHSGDPTGPKEQKEAVASKTESNPFD

SEQ ID NO: 1268 - protein, 102 aa, Artificial
  HIV Tat
MDPVDPNLEPWNHPGSQPRTACNQCYCKMCCYHCQNCFITKGLGISYGRKKRRPRRRPPQGSQAHQDPVPEQPPSQPRGDPTGPKKQKKEVESKTEADQFDW

SEQ ID NO: 1269 - protein, 102 aa, Artificial
  HIV Tat
MDPVDPNLEPWNHPGSQPRTACNQCHCKKCCYHCQVCFITKGLGISYGRKKRRSRRRPPQGGQAHQIPVPEQPSSQARGDPTGQKEQKKKVESKAETDPFDC

SEQ ID NO: 1270 - protein, 101 aa, Artificial
  HIV Tat
MEPVDPKIEPWNQPGSRPKTACTKCYCKKCCYHCPVCFLNKGLGISYGRKKRRQRRQAPPGSKNHQDPVSKQPLSQTQREQTGPEKSKKEVESKAEPDRFD

SEQ ID NO: 1271 - protein, 101 aa, Artificial
  HIV Tat
MEPVDPNIEPWNQPGSRPKTACTPCYCKKCSYHCQLCFLNKGLGISYGRKKRRQRRTAPPGSKNHQDPVPKQPLSQTQRGPTGPEKSKKKVESKAEPDRFD

SEQ ID NO: 1272 - protein, 101 aa, Artificial
  HIV Tat
MEPVDPKIEPWNQPGSRPKTACTSCYCKRCCYHCPLCFLNKGLGISYGRKKRRQRRTAPPGSKNHQDPVPKQPLSQTQRKSTGPEESKKEVESKAETDRFD

SEQ ID NO: 1273 - protein, 101 aa, Artificial
  HIV Tat
MEPVDPNIEPWNQPGSRPKTACTSCYCKQCCYHCPVCFLNKGLGISYGRKKRRQRRTAPLGSKSHQDPVPKQPLSQTQRESTGPEKSKEEVESKTEPDRFD

SEQ ID NO: 1274 - protein, 101 aa, Artificial
  HIV Tat
MEPVDPNIEPWNQPGSRPKTACNQCYCKRCCYHCPHCFLKKGLGIYYGRKKRRQRRAASHSSENHQDPIPKQPSTQPNRKPTGPEESKKEVESKAEPDRFD

SEQ ID NO: 1275 - protein, 101 aa, Artificial
  HIV Tat
MEPGDINIDPWNQPGSQPKTACNQCYCKRCCYHCQHCFLKKGLGISYGRKKWRQRRTASRSSKNHQDPIPEQPLPQASRNPTGPEEPKKEVESKAEPAPFD

SEQ ID NO: 1276 - protein, 101 aa, Artificial
  HIV Tat
MDPVDPNLEPWNHPGSQPRTPCNKCHCKKCCYHCPVCFLNKGLGISYGRKKRRQRRGPPQGGQAHQVPIPKQPSSQPRGDPTGPKEQKKKVESEAETDPDC

SEQ ID NO: 1277 - protein, 101 aa, Artificial
  HIV Tat
MDPVDPNLESWNHPGSQPRTACNKCHCKKCCYHCQVCFITKGLGISYGRKKRRQRRKPPQGDQAHQVPIPEQPSSQSRGDPTGPKKKKKVESEAETDPFDW

SEQ ID NO: 1278 - protein, 101 aa, Artificial
  HIV Tat
MDPVDPNIDPWNHPGSQPRTACNNCYCKKCCYHCQVCFITKGLGISYGRKKRRQRRRPPHSSQTHQDPIPKQPSSQPRGDPTGQKEKKKVESKTEVHPFDW

SEQ ID NO: 1279 - protein, 101 aa, Artificial
  HIV Tat
MEPVDPNLEPWNHPGSQPRTPCNKCYCKRCCYHCYVCFVTKGLGISYGRKKRRPRRRTPPGGQANQDPVPKQPSSQPRGNPTGPKEKKKVESETEADPFDW

SEQ ID NO: 1280 - protein, 101 aa, Artificial
  HIV Tat
MEPVDPSLDPWNHPGSQPTTPCTKCYCKRCCFHCQWCFTTKGLGISYGRKKRRQRHRTPQSSQVHQNSLPKQPLSQARGDPTGPKESKKEVESKAKTDPCA

SEQ ID NO: 1281 - protein, 100 aa, Artificial
  HIV Tat
MELVDPNLDPWNHPGSQPTTPCTRCYCKWCCFHCYWCFTTKGLGISYGRKKRRQRPRTPQSSQIHQDFVPKQPISQARGNPTGPKESKKEVESKAKTDPD

SEQ ID NO: 1282 - protein, 101 aa, Artificial
  HIV Tat
MELVDPNLDPWNHPGSQPPTPCNKCYCKRCCFHCYWCFATKGLGISYGRKKRRQRHRTPQSSQIHQDPVPKQPLSQPRRNPTGPKESKKEVESKAKTDPCD

SEQ ID NO: 1283 - protein, 101 aa, Artificial
  HIV Tat
MELVDPNLDPWNQPGSQPTTPCTKCYCKKCCFHCYCCFATKGLGISYGRKKRRQRRRTPQSSQSHKNPIPEQPLSQARGDPTGPKESKKEVESKTETDPFD

SEQ ID NO: 1284 - protein, 101 aa, Artificial
  HIV Tat
MEVVDPNLDPWKHPGSQPETPCNKCYCKKCCFHCQLCFTRKGLGISYGRKKRRQRRRTPQSGEVHQDPVSKQPLSQTRGDPKGPEESKKKVESKTKTDPSD

SEQ ID NO: 1285 - protein, 101 aa, Artificial
  HIV Tat
MEQVDPNLDPWNHPGSQPKTACNNCYCKKCCFHCQVCFTTKGLGISYGRKKRRQRRRTPQSSQAHQNPISKQPLSQARGDPTGPKEPKKEVESKTETDPLD

SEQ ID NO: 1286 - protein, 100 aa, Artificial
  HIV Tat
MDPVDPKLEPWKHPGSQPKTPCNNCYCKSVAALQVCFLNKGLGISYGRKKRKHRRGTPHSSKDHQTPVPKQPFSTTRGNPTGPQESKKEVESKTETDPFD

SEQ ID NO: 1287 - protein, 101 aa, Artificial
  HIV Tat
MDPVDPKLEPWNHPGSQPTTPCNKCYCKVCCWHCQVCFLNKGLGISYGRKKRRPRRGTPQGSKDHQNPVPKQPLPITSGNPTGSEKPKKEVASKTETDPLD

SEQ ID NO: 1288 - protein, 101 aa, Artificial
  HIV Tat
MDPVDPNLEPWNHPGSQPKTPCNKCFCKVCCWHCQVCFLNKGLGISYGRKKRKHRRGTPQSSKGHQDPVPKQPLPTTRGNPTGPKESKKEVASKAEADQCD

SEQ ID NO: 1289 - protein, 101 aa, Artificial
  HIV Tat
MDPVDPNQEPWNHPGSQPRTACNNCYCKKCCYHCQLCFLKKGLGIYYGRKKRRQRRGTPKSLQDHQTLIPKQPLSRTSGDPTGPEKKKKVASKTETDPFDW

SEQ ID NO: 1290 - protein, 100 aa, Artificial
  HIV Tat
MDPVDPNQEPWNHPGNQPKTPCNNCYCKQCSFHCQLCFLKKGLGISYGRKKRSRRRATPASVQDHQNHIPKQPLSRTRGDPTGPKEKKKVASKTEADPCD

SEQ ID NO: 1291 - protein, 100 aa, Artificial
  HIV Tat
MDPVDPKLEPWNHPGSQPQTACNNCYCKKCCYHCQMCFLKKGLGISYGRKKRSQRHRTPASLQDHQNSISKQPLSRTHGDPTGPKEQKKEVASKTETDPD

SEQ ID NO: 1292 - protein, 101 aa, Artificial
  HIV Tat
MEPVDPNREPWNHPGSQPKTACTNCYCKKCCYHCQVCFLQKGLGISYGRKKRRQRRSAPPGSKTHQDLIPKQPLSQTQRKPTGPEESKKEVESKAEPDRFD

SEQ ID NO: 1293 - protein, 101 aa, Artificial
  HIV Tat
MEPVDPNREPWNHPGSQPKTACTNCYCKKCCYHCQVCFLQKGLGISYGRKKRRQRRSAPPGSKNHQDLIPEQPLFQTQRKPTGPEESKKEVESKAEPDRFD

SEQ ID NO: 1294 - protein, 100 aa, Artificial
  HIV Tat
MEPVDPNIEPWNQPGSQPKTACNQCYCKKCCYHCQLCFLQKGLGICYGREKRRQRTTTPYASKNHKDPIPKQPLPQARGDPTGPKESKKEVESKTKTDPD

SEQ ID NO: 1295 - protein, 101 aa, Artificial
  HIV Tat
MDPVDPNIEPWNQPGSQPKTACNQCYCKRCCYHCQICFLKKGLGISNGRKKRRPRRTTPYNSENHQDPLRKQPLSQPRGEQTDPKESKKKVESKTKTDQFD

SEQ ID NO: 1296 - protein, 101 aa, Artificial
  HIV Tat
MEPVDPRLEPWNHPGSQPKTACNNCYCKRCCYHCLYCFTKKGLGISYGRKKRSQRRRTPQSSKSHQDLIPEQPLSQQQGDQTGQKKQKEALESKTEADPCD

SEQ ID NO: 1297 - protein, 100 aa, Artificial
  HIV Tat
MDPVDPEVPPWHHPGSQPQIPCNNCYCKRCCYHCYVCFVRKGLGISYGRKKRGRPAAASHPDHKDPVPKQSPTITKRKQERQEEQEEEVEKKAGPGGYPR

SEQ ID NO: 1298 - protein, 101 aa, Artificial
  HIV Tat
MDPVDPEMPPWHHPGSKPQTPCNNCYCKRCCYHCYVCFTKKGLGISHGRKKRRRPAAAASYPDNKDPVPEQSLSHTGRKQKRQEEQEKKVEKETGPSGQPC

SEQ ID NO: 1299 - protein, 100 aa, Artificial
  HIV Tat
MDPVDPEMPPWHHPGSQPQTPCNKCYCKACCYHCYVCFASKGLGISYGRKKRRRPAAAARHPDNQDIVPEQLTYITNRKQKRQEEQEKEVENEACPRYPG

SEQ ID NO: 1300 - protein, 102 aa, Artificial
  HIV Tat
MDPVDPEMPPWHHPGSQPQTPCNKCYCKACCYHCYVCFASKGLGLSYGRKKRRRPAAAARNPDNQDIVPEQPPPITNNRKHKRQEEQEKEVEKETGSDRYPR

SEQ ID NO: 1301 - protein, 101 aa, Artificial
  HIV Tat
MDPVDPRLEPWNHPGSQPKTACNSCYCKRCCLHCQVCFMTKGLGISYGRKKRGKRRRTPQSGPNHQNIVSKQPSSQPRGDPTGQEEPKKKVEKKTTTDPFD

SEQ ID NO: 1302 - protein, 192 aa, Artificial
  HIV Vif
MENRWQVLIVWQVDRMKIRTWNSLVKHHMYVSKRANGWFYRHHYESRHPKLSSEVHIPLGDARLVIKTYWGLHTGERDWHLGHGVSIEWKLRRYSTQVDPGLADQLIHMHYFDCFADSAIRKALLGQVVIPRCDYQAGHNKVGSLQYLALTALIKPKKRKPPLPSVRKLVEDRWNKPQKTRGRRGNHTMNGH

SEQ ID NO: 1303 - protein, 192 aa, Artificial
  HIV Vif
MENRWQGLIVWQVDRMKIRTWNSLVKHHMYVSRRANGWFYRHHYESRHPKVSSEVHIPLGDARLVIITYWGLHTGERDWHLGHGVSIEWRLRRYSTQVDPGLADQLIHMHYFDCFADSAIRQAILGHIVIPRCDYQAGHTKVGSLQYLALTALIKPKKIKPPLPSVRKLVEDRWNKPQRTKGRRGNHTMNGH

SEQ ID NO: 1304 - protein, 192 aa, Artificial
  HIV Vif
MENRWQVLIVWQVDRMKIRAWNSLVKHHMYISRKASGWFYRHHYESRHPKISSEVHIPLGDARLVIKTYWGLQTGEREWHLGHGVSIEWRLRRYSTQVDPGLADQLIHIHYFDCFADSAIRKAILGHIVTPRCDYQAGHNKVGSLQYLALTALIKPHKRKPPLPSVRKLVEDRWNNPQKTKGRRGNHTMNGH

SEQ ID NO: 1305 - protein, 192 aa, Artificial
  HIV Vif
MENRWQVLIVWQVDRMKIRTWNSLVKHHMYISRRAKGWVYRHHYESRHPRISSEVHIPLGDAKLVIKTYWGLHTGEREWHLGHGVSIEWRLKSFSTQVDPGLADQLIHMHYFDCFAGSAIRKAILGQIVSPRCDYQAGHSKVGSLQYLALTALIKPKRIKPPLPSLQKLVEDKWNNPQKTRGHRGSHTMNGH

SEQ ID NO: 1306 - protein, 192 aa, Artificial
  HIV Vif
MENRWQVLIVWQVDRMRIRTWNSLVKHHMYVSRRASGWFYRHHYESRHPKISSEVHIPLGDARLIIKTYWGLQTGEKDWHLGHGVSIEWRLRKYSTQVDPGLADQLIHMHYFDCFAESAIRKALLGQVVNPRCDYQAGHNKVGSLQYLALTALIKPKKIKPPLPSVRKLVEDRWNNPQKTRGRRGNHTMNGH

SEQ ID NO: 1307 - protein, 192 aa, Artificial
  HIV Vif
MENRWQVLIVWQVDRMKIRTWNSLVKHHMYISRRASGWSYRHHYESRHPKISSEVHIPLGEARLVITTYWGLQTGEREWHLGHGVSIEWRLRRYSTQVDPGLADQLIHMHYFDCFADSAIRKAILGHIVIPRCDYQAGHNKVGSLQYLALTALIKPKKIKPPLPSIRKLVEDRWNKPQKTRGRRGNHTMNGH

SEQ ID NO: 1308 - protein, 192 aa, Artificial
  HIV Vif
MENRWQVLIVWQVDRMKIRTWNSLVKHHMYISKRAKGWLYRHHYENRHPKISSEVHIPLGDARLVITTYWGLNTGERDWHLGHGVSIEWRLGRYSTQVDPGLADQLIHMHYFDCFTDSAIRKALLGHIVIHRCDYQAGHNKVGSLQYLALTALIKPRKIKPPLPSVRKLVEDKWNKPQKTRGRRGNHTMNGH

SEQ ID NO: 1309 - protein, 192 aa, Artificial
  HIV Vif
MENRWQVLIVWQVDRMKIKTWNSLVKHHMYVSKRAKGWFYRHHYESSHPRVSSEIHIPLGEARLVIKTYWGLQTGEREWHLGHGVSIEWRWKRYSTQVEPGLADQLIHMHYFDCFADSAIRKAILGHIVIPRCDYPAGHNKVGSLQYLALTALIKPKKIKPPLPSVRKLVEDRWNNPQKTRGRRGNHTMNGH

SEQ ID NO: 1310 - protein, 192 aa, Artificial
  HIV Vif
MENRWQVLIVWQVDRMRIRTWNSLVKHHMYISKKARGWFYRHHYESRHPKISSEVHIPLGDARLVIKTYWGLHTGEREWHLGHGVSIEWRLRKYSTQIDPGLADQLIHMHYFDCFADSAIRKALLGHIVIPRCEYPAGHKKVGSLQYLALTALIKPKKRKPPLPSVRKLVEDRWNKPPKTRDRRGNHTMNGH

SEQ ID NO: 1311 - protein, 192 aa, Artificial
  HIV Vif
MENRWQVLIVWQVDRMKIRTWNSLVKHHMYVSRKANGWFYRHHYESRHPKISSEVHIPLGEARLVIITYWGLQTGEREWHLGHGVSIEWRLRRYSTQVDPGLADQLIHTHYFDCFADSAIRKAILGHRVSPRCDYQAGHNKVGSLQYLALTALIKPKKRKPPLPSVKKLVEDRWNKPQKTRGRRGSHTMNEH

SEQ ID NO: 1312 - protein, 192 aa, Artificial
  HIV Vif
MENRWQVLIVWQVDRMKIKTWNSLVKHHMYISKKAKGWFYRHHYESRNPKISSEVHIPLGDARLVIKTYWGLQTGERDWHLGHGVSIEWRLRKYSTQVEPDLADQLIHIHYFDCFADSAIRKAILGHIVIPRCDYQAGHNKVGSLQYLALTALIKPQRRKPPLPSVSKLVEDRWNNPQKTRGRRGCHTMNGH

SEQ ID NO: 1313 - protein, 192 aa, Artificial
  HIV Vif
MENRWQVLIVWQVDRMKIRTWNSLVKHHMYISRKAKGWYYRHHFESRHPKISSEVHIPLGEARLVVKTYWGLQTGEREWHLGHGVSIEWRLRGYSTQVDPGLADQLIHMHYFDCFADSAIRKAILGHRVIHRCDYQAGHNKVGSLQYLALTALIKPKKIKPPLPSVRKLVEDRWNNPQKTRGRRGNHTMNGH

SEQ ID NO: 1314 - protein, 191 aa, Artificial
  HIV Vif
MENRWQVLIVWQIDRMKIRTWNSLVKHHMYISRRASGWFYRHHYESRNPKISSEVHIPLGEARLVIKTYWGLHTGERDWHLGHGVSIEWKLKRYSTQVDPGLADLIHMHYFDCFTDSAIRKAILGQVVIPRCDYQAGHNKVGSLQYLALTALIKPKKIKPPLPSVRKLVEDRWNKPQKTRGRRGNYTMNGH

SEQ ID NO: 1315 - protein, 192 aa, Artificial
  HIV Vif
MENRWQVLIVWQIDRMKIRTWNSLVKHHMYISRRANGWFYRHHYESRHPKVSSEVHIPLGEARLVITTYWGLQTGEREWHLGHGVSIEWRLRRYKTQVDPGLADQLIHMHYFDCFAESAIRQAILGHIVIPRCDYQAGHNKVGSLQYLALTALIKPKKIKPPLPSVQKLVEDRWNKPQKTRGRRGNHTMNGH

SEQ ID NO: 1316 - protein, 192 aa, Artificial
  HIV Vif
MENRWQALIVWQVDRMRIRTWNSLVKHHMHVSKRAKGWFYRHHFESRHPKVSSEVHIPLGEARLVVITYWGLQTGEREWHLGQGVSIEWRLRRYSTQVDPGLADQLIHMHYFDCFADSAIRKAILGHIVIPRCDYQAGHNKVGSLQYLALTALIKPKKRKPPLPSVRKLVEDRWNKPQKTRGRKGNHTMNGH

SEQ ID NO: 1317 - protein, 192 aa, Artificial
  HIV Vif
MENRWQGLIVWQVDRMRIRTWNSLVKHHMYISRRASGWFYRHHYDSRHPKISSEVHIPLGDARLVIKTYWGLQTGERDWHLGHGVSIEWRLRKYSTQVDPGLADQLIHMHYFDCFADSAIRKAILGHIVIPRCDYQAGHNKVGSLQYLALTALIKPKKRKPPLPSVRKLVEDRWNNPQKTRGHRGNHTMNGH

SEQ ID NO: 1318 - protein, 192 aa, Artificial
  HIV Vif
MENRWQVLIVWQVDRMKIRTWNSLVKHHMYISRRAAGWFYRHHYESRNPRVSSEVHIPLGDARLVIKTYWGLQTGERAWHLGHGVSIEWRMKRYSTQVDPGLADQLIHMHYFDCFADSAIRKAILGHIVSPRCDYQAGHNKVGSLQYLALTALVKPKKIKPPLPSVKKLVEDRWNKPQKTRGRRGNHTMNGR

SEQ ID NO: 1319 - protein, 192 aa, Artificial
  HIV Vif
MENRWQVLIVWQVDRMKIRTWNSLVKHHMYTSKKATGWFYRHHYESRHPKVSSEVHIPLGEARLVIKTYWGLQTGERDWHLGHGASIEWRLRRYSTQVVPGLADQLIHMHYFDCFADSAIRKAILGHIVIPRCVYQAGHNKVGSIQYLALTALIKPKQIKPPLPSVQKLVEDRWNKPQKTRGRRGDHTMNGH

SEQ ID NO: 1320 - protein, 192 aa, Artificial
  HIV Vif
MENRWQVLIVWQVDRMRIRTWNSIVKHHMYVSRRTNGWFYKHHYESRNPKVSSGVHIPLGDARLVIKTYWGLQTGEREWHLGHGVSIEWRLRKYSTQVEPGLADQLIHMHYFDCFADSAIRRAILGHIVIPRCDYQAGHNKVGSLQYLALTALIKPKKIKPPLPSVKKLVEDRWNNPQKTRGRRGNHTMSGH

SEQ ID NO: 1321 - protein, 192 aa, Artificial
  HIV Vif
MENRWQVLIVWQVDRMKIRTWNSLVKHHMYISRRTMGWFYRHHFQSRHPKVSSEVHIPLGDARLVITTYWGLQTGEREWHLGHGVSIEWRLKRYSTQVDPGLADQLIHMHYFDCFADSAIRQAILGHIVFPRCDYPAGHNKVGSLQYLALTALIKPKRRKPPLPSVRKLVEDRWNKPQKTRGRRGNHTMNGH

SEQ ID NO: 1322 - protein, 191 aa, Artificial
  HIV Vif
MENRWQVLIVWQVDRMKIRTWNSLVKHHMHISKRAKGWFYRHHFESRHPKVSSEVHIPLGDARLVIKTYWGLQTGERDWHLGHGVSIEWRLGKYNTQVEPGLADQLIHMHYFDCFADSAIRKAILGHIVFPRCDYQAGHNKVGSLQYLALTAIKPKKRKPPLPSVRKLVEDRWNKPQKTRGRRGNHTMNGH

SEQ ID NO: 1323 - protein, 192 aa, Artificial
  HIV Vif
MENRWQALIVWQVDRMRIRTWNSLVKHHMYISRRASGWFYRHHFESRHPKVSSEVHIPLGEARLVIITYWGLQTGEREWHLGHGVSIEWRLRRYSTQVDPGLADQLIHIHYFDCFADSAIRKAILGHIVISRCDYQAGHNKVGSLQYLALTALIKPKKRKPPLPSVRKLVEDRWNKSQKTRDRRGNHTMNGH

SEQ ID NO: 1324 - protein, 192 aa, Artificial
  HIV Vif
MENRWQVLIVWQVDRMRIRTWNSLVKHHMYISRRASGWFYRHHYESRHPKVGSEVHIPLGEARLVIRTYWGLQTGEREWHLGHGVSIEWRLRKYSTQVDPGLADQLIHMHYFDCFADSAIRKAILGHIVIPRCDYQAGHNKVGSLQYLALTALIKPKKIKPPLPSIRKLVEDRWNKSQKTRGRRGNHTMNGH

SEQ ID NO: 1325 - protein, 192 aa, Artificial
  HIV Vif
MENRWQVLIVWQVDRMRIRTWNSLVKHHMYVSRKAHGWFYRHHYQSRHPKVSSEVHIPLGEDKLVITTYWGLQTGEREWHLGHGVSIEWRLKKYSTQVDPGLADQLIHMHYFDCFADSAIRKAILGHIVIPRCDYQAGHNKVGSLQYLTLTALIKPKKIKPPLPSVRKLAEDRWNNPQKTRGRRGNHTMSGH

SEQ ID NO: 1326 - protein, 192 aa, Artificial
  HIV Vif
MENRWQVLIVWQVDRMKIRTWNSLVKHHMYISKRANGWFYRHHYQSRHPKVSSEVHIPLGEARLVITTYWGLQTGEREWHLGHGVSIEWRLKRYSTQVDPGLADQLIHMHYFDCFADSALRKAILGHIVFPRCDYQAGHNKVGSLQYLALTALIKPKKRKPPLPSVRKLVEDRWNNSQKTRDHRGNHTMSGH

SEQ ID NO: 1327 - protein, 192 aa, Artificial
  HIV Vif
MENRWQVMIVWQVDRMKIRTWNSLVKHHMYVSKKANGWFYRHHYESRHPRISSEVHIPLGEARLIIKTYWGLQTGERDWHLGHGASIEWRLRRYSTQVDPGLADQLIHMHYFDCFADSAIRKAILGHIVIPRCDYQAGHNKVGSLQYLALTALIKPKKRKPPLPSVRKLVEDRWNNPQKTRGHRGNHTMNGH

SEQ ID NO: 1328 - protein, 191 aa, Artificial
  HIV Vif
MENRWQVLIVWQIDRMRIKTWNSLVKHHMYVSRRASGWFYRHHFESRHPKISSEVHIPLGEARLIIKTYGLQTGEGDWHLGHGCSIEWRLRKYSTQVDPGLADQLIHMHYFDCFTESAIRKAILGHIVIPRCDYQAGHNQVGSLQYLALTTLIKPKRRKPPLPSVRKLAEDRWNNPQKTRDRRGNHTMNGH

SEQ ID NO: 1329 - protein, 192 aa, Artificial
  HIV Vif
MDNRWQGLIVWQVDRMRIRTWNSLVKHHMYVSRRANGWFYRHHHESRHPKVSSEVHIPLGDARLVIKTYWGLHTGERDWHLGHGVSIEWRLRRYNTQVDPGLADQLIHMHYFDCFADSAIRKAILGRIVIPRCDYQAGHNQVGSLQYLALTALIKPKRPKPPLPSVRKLAEDRWNKPRKTRGRRGNHTMNGH

SEQ ID NO: 1330 - protein, 192 aa, Artificial
  HIV Vif
MENRWQVLIVWQVDRMRIRTWNSLVKHHMYVSRRASGWFYRHHFESRHPKVSSEVHIPLGEARLVIKTYWGLQTGEREWHLGHGVSIEWRLRRYSTQVDPGLADQLIHMHYFDCFADSAIRKAILGHIVIPRCDYQAGHNKVGSLQYLALTALIKPKKRKPPLPSVKKLVEDRWNDPQKTRGRRGSHTMNGH

SEQ ID NO: 1331 - protein, 192 aa, Artificial
  HIV Vif
MENRWQVMIVWQVDRMKIRTWNSLVKHHMYVSKKAKGWFYRHHYESRHPRVSSEVHIPLGDARLVIKTYWGLQTGERDWHLGHGVSIEWRLRGYSTQVDPGLADQLIHMHYFDCFADSAIRKAILGQIVSPRCEYQAGHNKVGSLQYLALTALIKPKKRKPPLPSVRKLVEDRWNEPQKTRGRRGNHTMNGH

SEQ ID NO: 1332 - protein, 192 aa, Artificial
  HIV Vif
MENRWQVLIVWQVDRMKIRTWNSLVKHHMHISKRAKGWFYRHHYESRHPKVSSEVHIPLGEARLVIKTYWGLQTGERDWHLGHGVSIEWRLRKYSTQVEPGLADQLIHMHYFDCFADSAIRKAILGEIVIPRCDYQAGHNQVGSLQYLALTALIKPKQRKPPLPSVRKLVEDRWNKPQKTRGRRGNHTMNGH

SEQ ID NO: 1333 - protein, 192 aa, Artificial
  HIV Vif
MENRWQVLIVWQVDRMKIRTWNSLVKHHMYISKRANGWFYRHHYESRHPKVSSEVHIPLGDARLVITTYWGLQTGEREWHLGHGVSIEWRLRRYSTQVDPGLADQLIHMYYFDCFADSAIRKAILGHIVNPRCDYQAGHNKVGSLQYLALTALIKPKKRKPPLPSISKLVEDRWNKPQRTRGRRGNHTMNGH

SEQ ID NO: 1334 - protein, 192 aa, Artificial
  HIV Vif
MENRWQALIVWQVDRMRIRTWTSLVKHHMYVSRRANGWYYRHHYESRHPKVSSEVHISLGEARLVIKTYWGLHTGERDWHLGHGVSIEWKLRGYSTQVDPGLADQLIHMHYFDCFTDSAIRKALLGQVVIPRCDYQAGHNKVGSLQYLALTALVKPKKIKPPLPSVRKLVEDRWNKPQKTRGRRGNHTMNGH

SEQ ID NO: 1335 - protein, 192 aa, Artificial
  HIV Vif
MENRWQGLIVWQVDRMRIRTWHSLIKHHMYVSKRADGWFYRHHYESRHPKVSSEVHIPLGDARLVIITYWGLQTGEREWHLGHGVSIEWRLRSYSTQVDPGLADQLIHMHYFDCFAGSAIRQAILGHIVIPRCDYQAGHKKVGSLQYLALTALIKPKKRKPPLPSVRKLVEDRWNKPQKTRGRKGNHTMNGH

SEQ ID NO: 1336 - protein, 191 aa, Artificial
  HIV Vif
MENRWQALIVWQVDRMRIRTWNSLVKHHMYVSKRTNGWFYRHHFESRHPKVSSEVHIPLGEARLVIITYWGLQTEREWHLGHGVSIEWRLRRYSTQVDPGLADQLIHMYYFDCFAESAIRKAILGHIVIPRCNYQAGHNKVGSLQYLALTALIKPKQIKPPLPSVRKLVEDRRNKPQKTRGRRGNRTMNGH

SEQ ID NO: 1337 - protein, 192 aa, Artificial
  HIV Vif
MENRWQVLIVWQVDRMKIKTWNSLVKHHMYISRRANGWSYGHHYESRNPKVSSEVHIPLGDAKLVIKTYWGLQTGERDWHLGHGVSIEWRWGNYSTQVEPGLADQLIHMHYFDCFTDSAIRKAILGNKIIHRCNYPAGHNKVGSLQYLALTALIKPKKIKPPLPSVNKLVEDRWNNPQKTRGRRGNHTLNGH

SEQ ID NO: 1338 - protein, 192 aa, Artificial
  HIV Vif
MENRWQVLIVWQVDRMKIRTWNSLVKHHMYISRRAKGWFYRHHYESRHPKISSEVHIPLGDAKLVITTYWGLHTGEGDWHLGHGVSIEWRLKRFSTQVDPGLADQLIHTHYFDCFADSAIRKAILGEIVSPRCDYPARHSQVGSLQYLALTAVIKPKKIKPPLPSVQKLVEDRWNKPQKTRGHRGSHTMNGH

SEQ ID NO: 1339 - protein, 192 aa, Artificial
  HIV Vif
MENRWQGLIVWQVDRMKIRTWNSLVKHHMYVSKRAAGWWYRHHYESRHPKISSEVHIPLGDARLVIKTYWGLNTGERDWHLGHGVSIEWRLRKYSTQVDPGLADQLIHMYYFDCFADSAIRRAILGYIVIPRCDYQAGHNKVGSLQYLALTALIKPKKRKPPLPSVRKLVEDRWNKPQKTRGRRESHTMNGH

SEQ ID NO: 1340 - protein, 192 aa, Artificial
  HIV Vif
MENRWQVLIVWQVDRMRIRTWNSLVKHHMYVSKKAAGWFYRHHYESRHPKVSSEIHIPLGDARLIVRTYWGLQTGEKEWQLGHGVSIEWRLRSFSTQVDPGLADQLIHMHYFDCFAESAIRKAILGHIVFPRCDYQAGHNKVGSLQYLALTALIKPKRIKPPLPSVRKLTEDRWNKPQKTKGRRGNHTMNGH

SEQ ID NO: 1341 - protein, 192 aa, Artificial
  HIV Vif
MENRWQVLIVWQVDRMRIRTWNSLVKHHMYTSGRASGWFYRHHYESRHPKVSSEVHIPLGKARLVITTYWGLQIGERDWHLGHGVSIEWRLRKYSTQVDPGLADQLIHMHYFDCFTDSAIRKAILGHIVIPRCDYQAGHNKVGSLQYLALTALIKPQKRKPPLPSVRKLVEDRWNNPQKTRGRRGNHTMNGH

SEQ ID NO: 1342 - protein, 192 aa, Artificial
  HIV Vif
MENRWQVLIVWQVDRMKIRTWNSLVKHHMYVSKRAKGWYYRHHYESRHPKISSEVHIPLGDARLVIKTYWGLNTGERDWHLGHGVSIEWRLRKYSTQVDPGLADQLIHMYYFDCFADSAIRKAILGHIVIPRCDYQAGHNKVGSLQYLALTALIKPKKRKPPLPSVKKLVEDRWNKPQKTRGRRGSHIMNGH

SEQ ID NO: 1343 - protein, 192 aa, Artificial
  HIV Vif
MENRWQGLIVWQVDRMKIRTWNSLVKHHMYISRRASGWFYRHHFESRHPKVSSEVHIPLGEAKLVIITYWGLQPGEREWHLGHGASIEWRLRRYSTQVDPGLADRLIHMHYFDCFAESAIRNAILGHIVIPRCDYPAGHNQVGSLQYLALTALIKTKKRKPPLPSVSKLVEDRWNKPQKTRGRRENHTMNGH

SEQ ID NO: 1344 - protein, 192 aa, Artificial
  HIV Vif
MENRWQVLIVWQVDRMKIRTWNSLVKHHMYISRRAKGWIYKHHFESRNPKISSEIHIPLGEARLVIKTYWGLNTGERDWHLGHGVSIEWRMRGYSTQVDPGLADQLIHMHYFDCFADSAIRQAILGNLVIPRCDYQAGHNKVGSLQYLALTALIKPKKRKPPLPSVRKLVEDRWNKPQKTRGHRGNHTMNGH

SEQ ID NO: 1345 - protein, 192 aa, Artificial
  HIV Vif
MENRWQVLIVWQVDRMRIRTWNSLVKHHMYVSKRAKGWFYRHHYESRHPKISSEVHIPLGDAKLVIKTYWGLQTGEREWHLGHGTSIEWILGGYSTQVDPGLADQLIHMHYFDCFAESAIRKAILGDRVSPRCDYQAGHNKVGSLQYLALTALIKPKKIKPPLPSVKKLVEDRWNKPQKTRDRRGNHTMNGH

SEQ ID NO: 1346 - protein, 192 aa, Artificial
  HIV Vif
MENRWQVLIVWQVDRMRIRAWNSLVKHHMHISKRAAGWFYRHHYESRNPKISSEVHIPLGDARLVVKTYWGLQTGERDWHLGHGVSIEWRLRRYSTQVDPGLADQLIHMHYFDCFADSAIRKAILGHIVIPRCDYPAGHSKVGSLQYLALTALIKPKRRKPPLPSVRKLVEDRWNKPQKTRGRRGNHTMNGH

SEQ ID NO: 1347 - protein, 192 aa, Artificial
  HIV Vif
MENRWQVLIVWQVDRMKIRTWNSLVKHHMYVSKRASKWFYRHHYESRHPKVSSEVHIPLGDARLIIKTYWGLQTGERDWHLGHGCSIEWRLRRYSTQVDPGLADQLIHMHYFDCFADSAIRQAILGHIVIPRCDYQAGHNKVGSLQYLALTALIKPKRRKPPLPSVRKLTEDRWNKPQKTRDHRGNHTMNGH

SEQ ID NO: 1348 - protein, 192 aa, Artificial
  HIV Vif
MENRWQVLIVWQVDRMRIRTWNSLVKHHMYISRRAEGWFYRHHYESRHPKVSSEVHIPLGEARLVIKTYWGLQTGEKDWHLGHGVSIEWRLKRYSTQVDPSMADQLIHMHYFDCFADSAIRKAILGHIVIPRCDYQAGHNKVGFLQYLALTALIKPKKIKPPLPSVQKLVEDRWNKPQKTRGRRGNHTMNGH

SEQ ID NO: 1349 - protein, 192 aa, Artificial
  HIV Vif
MENRWQVLIVWQIDRMKIRTWNSLVKHHMYVSKRAKGWFYRHHFESRHPKVSSEVHIPLGEARLIVRAYWGLQTGEREWHLGHGVSIEWRLRRYSTQVDPGLADQLIHMHYFDCFADSAIRKAILGHIVIPRCDYQAGHNKVGSLQYLALTALIKPKKIKPPLPSIRKLVEDRWNNPQKTRGRRGNHTMNGH

SEQ ID NO: 1350 - protein, 192 aa, Artificial
  HIV Vif
MENRWQVLIVWQVDRMRIRTWNSLVKHHMHISRRANGWFYRHHYESRHPRVSSEVHIPLGEARLVITTYWGLLPGEREWHLGHGVSIEWRLRRYSTQVDPGMADQLIHMHYFDCFADSAIRKAILGHIVIPRCDYQAGHNKVGSLKYLALTALLKTKRRKPPLPSVRKLVEDRWNNPQKTRGHRGNHTMNGH

SEQ ID NO: 1351 - protein, 192 aa, Artificial
  HIV Vif
MENRWQVMIVWQVDRMKIRTWNSLVKHHMYVSRRANGWFYRHHYESRHPKISSEVHIPLRDARLVIKTYWGLHTGERDWHLGHGVSIEWRLGRYSTQVDPGLADQLIHMHYFDCFTDSAIRKAILGHIVIHRCEYPAGHNKVGSLQYLALTALIKPKRIKPPLPSVRKLVEDRWNKPQKTRGHRGNHTMNGH

SEQ ID NO: 1352 - protein, 192 aa, Artificial
  HIV Vif
MENRWQGLIVWQVDRMRIRTWNSLVKHHMHVSRRANGWFYRHHYESRHPKVSSEVHIPLGDARLVITTYWGLHTGEREWHLGHGVSIVWRLRRYSTQVDPSLADQLIHMHYFDCCADSAIRQAILGHIVIPRCNYPAGHNKVGSLQYLALTALIKPKVIKPPLPSVRKLVEDRWNKPQKTRGRRGNHTMNGH

SEQ ID NO: 1353 - protein, 192 aa, Artificial
  HIV Vif
MENRWQVMIVWQVDRMRIRTWNSLVKHHMYVSKKAREWFYRHHYESRHPRVSSEVHIPLKEARLIVRTYWGLHPGEKDWHLGHGVSIEWRQGRYSTQIDPDLADHLIHLYYFDCFSESAIRRAILGEIVRPRCEYQAGHNKVGSLQYLALRALVASTRTKPPLPSVRKLVEDRWNKPQKTRGHRGSHTMNGC

SEQ ID NO: 1354 - protein, 192 aa, Artificial
  HIV Vif
MENRWQVMIVWQVDRMRIRTWNSLVKHHMYISRKAKGWVYKHHYESRNPRISSEVHIPLGEARIIVRTYWGLHIGEKDWHLGHGVSIEWRQNRYHTQIDPDLADHLIHLYYFDCFSESAIRKAIIGEIVSPRCEYQAGHNKVGSLQYLALKAVVASTRTKPPLPSVRKLVEDRWNKPQKTKGHRGSHTMNGC

SEQ ID NO: 1355 - protein, 192 aa, Artificial
  HIV Vif
MENRWQVMIVWQVDRMRIRTWNSLVKHHMYVSKKAKDWCYRHHYESINPRVSSEVHIPLGGAKIIVKTYWGLHPGEKDWHLGQGVSIEWRQERYSTQIDPDLAGHLIHLHYFDCFSDSAIRKAILGKIVRPRCEYQAGHNKVGSLQYLALKALVGETRTKPPLPSVRKLTEDRWNKPQKTKGHRGSHTMNGH

SEQ ID NO: 1356 - protein, 192 aa, Artificial
  HIV Vif
MENRWQVMIVWQVDRMRIKRWNSLVKHHMYVSRKAKDWFYRHHYESRHPKVSSEVHIPLGEATLVIRTYWGLQTGEKDWQLGHGVSIEWRQRKYSTQIDPELADQLIHLHYFDCFSESAIRKAILGQVVRPRCQYQAGHTKVGSLQYLALRALVKPTKIKPPLPSVKKLTEDRWNKPQKTRGHRENPTMSGY

SEQ ID NO: 1357 - protein, 191 aa, Artificial
  HIV Vif
  misc_feature (1)..(1): Xaa can be any naturally occurring amino acid
  misc_feature (8)..(8): Xaa can be any naturally occurring amino acid
  misc_feature (69)..(69): Xaa can be any naturally occurring amino acid
  misc_feature (74)..(74): Xaa can be any naturally occurring amino acid
  misc_feature (83)..(83): Xaa can be any naturally occurring amino acid
  misc_feature (88)..(88): Xaa can be any naturally occurring amino acid
  misc_feature (92)..(92): Xaa can be any naturally occurring amino acid
  misc_feature (167)..(167): Xaa can be any naturally occurring amino acid
  misc_feature (173)..(173): Xaa can be any naturally occurring amino acid
  misc_feature (184)..(184): Xaa can be any naturally occurring amino acid
  misc_feature (190)..(190): Xaa can be any naturally occurring amino acid
XENRWQVXIVWQVDRMRIRTWNSLVKHHMYVSKKAREVYRHHYESRQPRVSSEVHIPLGDARLVVKTYXGLHAXEKDWQLGHXVSIEXRQEXYSTQIDPDLADQLIHLYYFDCFSESAIRKAIVGHIVSPRCNYPAGHNKVGSLQYLALKALVTPTRERPPLPSVRXLTEDRXNKPQKTRGRRXNHTMNXC

SEQ ID NO: 1358 - protein, 192 aa, Artificial
  HIV Vif
MENRWQAMIVWQVDRMRIRTWNSLVKHHMHVSKKAKRWFYRHHYESRHPKVSSEVHIPLGDATLVVRAYWGLHTGEKDWHLGHGVSIEWRLKRYSTQITPDLADQLIHMHYFDCFSDSAIRKAIVGQVVSPKCEYQAGHNKVGSLQYLALKALVTPKKTKPPLPSVRILTEDRWNKPQKTRGLRESHTMNGC

SEQ ID NO: 1359 - protein, 192 aa, Artificial
  HIV Vif
MENRWQVMIVWQVDRMRIRTWNSLVKHHMYVSKKAKNWVYRHHFESRHPKVSSEVHIPLGDAKLVVRTYWGLHTGEKEWHLGHGVSIEWRLNRYSTQIDPDQADQLIHLHYFDCFSDSAIRKALLGQVVSPRCEYQAGHKKVGSLQYLALRALVAPRKTKPPLPSVRILAEDRWNKPQKTRDPRESHTMNGC

SEQ ID NO: 1360 - protein, 192 aa, Artificial
  HIV Vif
MENRWQVMIVWQVDRMRIRTWNSLVKHHMYVSRKAKDWFYRHHYESRNPRTSSEVHIPLGDARLVVRTYWGLHTGEKDWQLGHGVSIEWRLRRYSTQIDPDLADQQIHLHYFDCFSDSAIRKAILGHVVSPICEYHTGHNKVGSLQYLALKALVTPTRTKPPLPSVRKLAEDRWSKPQKTRGHRGSHTMNGC

SEQ ID NO: 1361 - protein, 192 aa, Artificial
  HIV Vif
MENRWQVMIVWQVDRMRIRTWNSLVKHHMCVSKKARNWFYRHHYESRHPKVSSEVHIPLGDARLVVRTYWGLQTGEKDWHLGHGVSIEWRLKRYSTQIDPDLADQLIHLYYLDCFSDSAIRKALLGQVVSPSCEYHTGHNQVGSLQYLALKALVTPKKTRPPLPSVRILAEDRWNKSRKTRGPRGSHTMNGC

SEQ ID NO: 1362 - protein, 192 aa, Artificial
  HIV Vif
  misc_feature (112)..(112): Xaa can be any naturally occurring amino acid
MENRWQVMIVWQVDRMRIRTWNSLVKHHMYISKKAKNWFYRHHFESRHPKVSSEVHIPLGEAKLVVRTYWGLQTGEKDWQLGHGVSIEWRLRRYSTQIDPDLADQLIHMHYXNCFSDSAIRKAILGQVVSPSCEYQAGHNKVGSLQYLALKALVTPKKIKPPLPSVKKLTEDRWNKPQKTRGHRGNHTMHGY

SEQ ID NO: 1363 - protein, 192 aa, Artificial
  HIV Vif
MENRWQVMVVWQVDRMRIRTWNSLVKHHMYISKKAKGWLYRHHFESRHPKVSSEVHIPLGEARLVVRTYWGLQTGEKDWHLGHGVSIEWRLRRYSTQIDPDLADQLIHLHYFKCFSDSAIRKAILGEIVSPRCEYQAGHNKVGSLQYLALKALVTPKKIRPPLPSVRKLAEDRWNKPQKTKGHRGSHTMNGH

SEQ ID NO: 1364 - protein, 192 aa, Artificial
  HIV Vif
MENRWQVMIVWQVDRMRIRTWNSLVKHHMYISKKAAGWFYRHHYESRHPKVSSEVHIPLGDARLIVRTYWGLHPGERDWQLGHGVSIEWRLRRYSTQIDPDLADQLIHLHYFNCFSDSAIRKAILGRVVSPSCEYQTGHNKVGSLQYLALKALVTPKRTKPPLPSVRKLTEDRWNKPQKTKGHRGSHTMNGC

SEQ ID NO: 1365 - protein, 192 aa, Artificial
  HIV Vif
MENRWQVMIVWQVDRMRIRTWNSLVKHHMYISRRAKGWFYRHHYESRHPKVSSEVHIPIGDARIVVRTYWGLQTGEKDWHLGHGVSIEWRLKRYSTQIDPDLADQLIHLHYFNCFSDSAIRKAILGQVVSPRCDYQTGHNKVGSLQYLALKALVTPSRMKPPLPSVKKLAEDRWNKPQKTRGRRESHTMNGC

SEQ ID NO: 1366 - protein, 192 aa, Artificial
  HIV Vif
MENRWQVMIVWQVDRMKIRTWNSLVKHHMYVSKKAQGWFYRHHYESRHSRVSSEVHIPLGEARLVVRTYWGLHTGEKDWHLGHGVSIEWRLKRYSTQVDPDLADHLIHLHYFDCFSESAIRRAILGQIVRPRCEYQAGHNKVGSLQYLALKALVTPTRAKPPLPSVKKLTEDRWNKPQKTRGHRGSRTLNRH

SEQ ID NO: 1367 - protein, 191 aa, Artificial
  HIV Vif
MENRWQALIVWQVDRMKIRTWNSLVKHHMYVSRKANGWFYRHHYDSRHPKVSSEVHIPLGEAKLVIKTYWGLQTGERDWHLGHGVSIEWRLRRYSTQVEPGLADQLIHMHYFDCFADSAIRQAILGHIVIPRCDYQAGHKVGSLQYLALTALIKPKKRKPPLPSIRKLVEDRWNNPQKTRGRRGNHTMNGH

SEQ ID NO: 1368 - protein, 192 aa, Artificial
  HIV Vif
MENRWQVMIVWQVDRMKIRTWNSLVKHHMYASRRAKGWFYRHHYESRHPKISSEVHIPLGEARLVIKTYWGLQTGERDWHLGHGVSIEWRLRRYKTQVDPGLAGQLIHMHYFDCFADSAIRKAILGHIVSPRCDYQAGHNKVGSLQYLALTALIKPKKIKPPLPSVSKLVEDKWNKPQKTRGRRGNHTMNGH

SEQ ID NO: 1369 - protein, 192 aa, Artificial
  HIV Vif
MENRWQVMIVWQVDRMRIRTWNSLVKHHMYISKKAKRWFYRHHYESRHPKTSSEVHIPLGEARLVIITYWGLQTGERDWHLGHGVSIEWRLGRYRTQVDPGLADQLIHMHYFDCFADSAIRKAILGHIVSPRCDYQAGHNKVGSLQYLALTALIKPKKIKPPLPSVRKLVEDKWNKPQKTRGRRGNHTMNGH

SEQ ID NO: 1370 - protein, 191 aa, Artificial
  HIV Vif
  misc_feature (44)..(44): Xaa can be any naturally occurring amino acid
MENRWQVMIVWQVDRMRIGTNSLVKHHMYVSKKARGWFYRHHYXTRHPRISSEVHIPLGDAKIVVRTYWGLHTGEKDWHLGHGVSIEWRLRKYSTQIDPDPADQLIHLHYFDCFSDSAIRKAILGQVVSPRCDYTAGHNKVGSLQYLALKALVTPTRVKPPLPSVRKLAEDRWSKSQKTRGLRGSLTMNGC

SEQ ID NO: 1371 - protein, 192 aa, Artificial
  HIV Vif
MENRWQVMVVWQVDRMRIRTWHSLVKHHMYTSKKAKNWCYRHHYESMHPKVSSEVHIPLGDARIVVRTYWGLHTGEKAWQLGHGVSIEWRQRRYSTQIDPDLADQLIHLYYFDCFSDSAIRKAILGQVVRPRCEYQAGHNKVGSLQYLALKALVTPTQIRPPLPSVRKLTEDRWNKPQKTRGHRGNHTMNGH

SEQ ID NO: 1372 - protein, 192 aa, Artificial
  HIV Vif
MENRWQVMIVWQVDRMRIRTWKSLVKYHMYVSKQARGWLYRHHYDCLNPKVSSEVHIPLGEARLVVKTYWGLHTGERDWHLGQGVSIEWRKRRYSTQVDPGLADQLIHIYYFDCFTESAIRKAILGHIVTTRCNYQTGHNKVGSLQYLALTALITPKKEKPPLPSVKKLTEDRWNKPQRTKGHRGSHTMNGH

SEQ ID NO: 1373 - protein, 192 aa, Artificial
  HIV Vif
MENRWQVMIVWQVDRMRIKTWNSLVKHHMYVSKKAQNWVYRHHYESRHPRVSSEVHIPLGDAKLVVRTYWGLHTGEKDWHLGHGVSIEWRLRRYSTQIDPDQADQLIHLHYSNCFSESAIRKAILGQVVRPKCEYQTGHNKVGSLQYLALKALVTPTKTKPPLPSVRILTEDRWNKPQKTRGLRESHTMNGC

SEQ ID NO: 1374 - protein, 192 aa, Artificial
  HIV Vif
MENRWQVMIVWQVDRMRIRTWHSLVKHHIYVSKKANKWLFRHHYESRHPKVSSEVHIPLGDARLVVRTYWGLQTGEKAWHLGHGVSIEWRQKRYSTQIDPDLADHLIHLHYFDCFSDAVIRKAILGQVVRPRCEYQAGHNQVGSLQYLALTALVAPKKIKPPLPSIKKLAEDRWNKPQKTRGHRGSHTMNGC

SEQ ID NO: 1375 - protein, 192 aa, Artificial
  HIV Vif
MENRWQVMIVWQVDRMRIRTWHSLVKHHMYVSKKAKNWFYRHHYESRHPKVSSEVHIPLGDARLVVRTYWGLQTGEKDWHLGHGVSIEWRQKRYSTQLDPDLADQLIHLYYFDCFSESAIRQAILGHIVSPRCDYQAGHNKVGSLQYLALTALIAPKKTRPPLPSVRKLTEDRWNKPQQTKGHRGSHTMNGH

SEQ ID NO: 1376 - protein, 193 aa, Artificial
  HIV Vif
MENRWQVMIVWQVDRMRIRTWNSLVKHHMYVSKKAKGWFYRHHYESRHPKVSSEVHIPLGDARLVVRTYWGLHTGEKDWHLGHGVSIEWRQRRYSTQIDPDLADQLIHLNYFDCFSDSAIRKAILGQVVRPRCEYQAGHNKVGSLQYLALKALVTPTRIRPPLPSVRKLTEDRWNKPQKTRGHRGSHTMNGQW

SEQ ID NO: 1377 - protein, 192 aa, Artificial
  HIV Vif
MENRWQVVIVWQVDRMRIRTWNSLVKYHMYKSKKAKDWFYRHHYESRHPKVSSEVHIPLGEARLVVRTYWGLHTGERDWHLGQGVSIEWKQRRYSTQIDPDLADQLIHLHYFNCFSESAVRKAILGEVVRPRCEYQTGHNQVGSLQYLALKALVTPTQTKPPLPSVKKLTEDRWNEPQKTRGHRGSHSTNGH

SEQ ID NO: 1378 - protein, 192 aa, Artificial
  HIV Vif
MENRWQVMIVWQVDRMRISTWKSLVKHHMYVSKKAQGWFYRHHYDCTHPRVSSEVHIPLGDARLVIKTYWGLHTGERDWHLGQGVSIEWRKGRYSTQVDPGLADQLIHMHYFDCFSDSAIRKAILGQVVRPRCEYSAGHNQVGSLQYLALKALVTPTRERPPLPSVQKLTEDRWNKPQKTKDHRGSHTMNGC

SEQ ID NO: 1379 - protein, 192 aa, Artificial
  HIV Vif
MENRWQVMIVWQVDRMRINTWKGLVKYHMYKSKKAKNWFYRHHYDSNHPKISSEVHIPLEEAKLVVTTYWGLHTGEREWHLGQGVSIEWRLRRYRTQVDPGLADQLIHMHYFDCFSESAIRKAILGHRVSPRCEYQAGHNKVGSLQYLALTALITPKKTKPPLPSVKKLVEDRWNKPQKTRGHRENQTMNEH

SEQ ID NO: 1380 - protein, 192 aa, Artificial
  HIV Vif
MENRWQVMIVWQVDRMRINTWKSLVKYHMHVSKKTKKWLYRHHYDSNHPKISSEVHIPLGSAELVVTTYWGLNTGEREWHLGQGLSIEWRLKRYRTQVDPGLADQLIHMHYFNCFSESAIRKAILGHIVSPICEYQAGHNKVGSLQYLALKAILKTEKRKPPLPSVQKLVEDRWNKPQRTRGHRESHTMNGH

SEQ ID NO: 1381 - protein, 192 aa, Artificial
  HIV Vif
MENRWQVMIVWQVDRMRIRTWKSLVKHHLYKSGKARRWVYRHHYESTHPRISSEVHIPLGEARLVITTYWGLHTGERDWHLGQGVSIEWRKRRYSTQVDPGLADQLIHMYYFDCFSESAIRNAILERIVSPSCEHQAGHNKVGSLQYLALAALITPRQTKPPLPSVTKLTEDRWNKPRKTKGHRGSHTMSGH

SEQ ID NO: 1382 - protein, 192 aa, Artificial
  HIV Vif
MENRWQVMIVWQVDRMRIKTWKSLVKHHMYISRKAKGWFYKHHYDSTHPKISSEVHIPLGDARLVITTYWGLHTGERDWHLGQGVSIEWRKKRYSTQVDPGLADQLIHLYYFDCFSESAIRNAILGRVVSPSCDYQAGHNKVGSLQYLALTALTTPKNRKPPLPSVTKLTEDRWNKPQRTKGHRGSHTMSGH

SEQ ID NO: 1383 - protein, 192 aa, Artificial
  HIV Vif
MENRWQVMIVWQVDRMRIRTWKSLVKHHMYVSGKAEKWFYKHHYESTNPRISSEVHIPLGDARLVITTYWGLHTGERDWQLGHGVSIEWRKKRYSTQVDPGLADQLIHLYYFDCFSESAIRNAILGRIGSPSCEYRAGHNKVGSLQYLALAALITPKKIKPPLPSVAKLTEDRWNKPRKTKGHRGSHTMNGH

SEQ ID NO: 1384 - protein, 192 aa, Artificial
  HIV Vif
MENRWAVMIVWQVDRMRIRTWNSLVKHHIYCSRKAKNWVYRHHYESTNPRVSSEVHIPLGEAKLVITTYWGLHTGERDWHLGQGASIEWRKRRYSTQVDPNLADQLIHLYYFDCFSESAIRNAILGRIVSPRCEYQAGHSKVGSLQYLALAALTTPKKIKPPLPIVTKLTEDRWNKPQKTKGHRGSHTMHGH

SEQ ID NO: 1385 - protein, 192 aa, Artificial
  HIV Vif
MENRWQVMIVWQVDRMRIRTWKSLVKHHMYVSGKARGWFYRHHYESPHPRISSEVHIPLGDARLVITTYWGLHTGERDWHLGQGVSIEWRKKRYSTQVDPELADQLIHLYYFDCFSDSAIRKALLGHIVSPRCEYQAGHNKVGSLQYLALAALITPKKIKPPLPSVTKLTEDRWNKPQKTKGHRGSHTMNGH

SEQ ID NO: 1386 - protein, 192 aa, Artificial
  HIV Vif
MENRWQVMIVWQVDRMRIRTWKSLVKHHMYVSKKAKGWFYRHHYESTHPRISSEVHIPLGDATLVVTTYWGLHTGEREWHLGQGASIEWRKKRYSTQVDPGLADQLIHTYYFDCFSESAIRNAILGNIVSPRCEYPAGHNKVGSLQYLALAALIKPKKIKPPLPSVTKLTEDRWNKPQKTKGHRGSHTMNGH

SEQ ID NO: 1387 - protein, 192 aa, Artificial
  HIV Vif
MENRWQVMIVWQVDRMRIRTWKSLVKHHMYISGKAKKWSYRHHYESTHPRISSEVHIPLGEARLVVTTYWGLHTGERDWHLGQGVSIEWRTKGYNTQVDPDLADQLIHLYYFDCFSESAIRKAIVGRLVSPRCEYQAGHNKVGSLQYLALTALIAPKKIKPPLPSVRKLTEDRWNKPQKTKGHRGSHTMNGH

SEQ ID NO: 1388 - protein, 192 aa, Artificial
  HIV Vif
MENRWQVMIVWQVDRMRIRTWKSLVKHHMYISGKAKKWVYKHHYENTHPRISSEVHIPLGEARLVITTYWGLHTGERDWHLGQGVSIEWRKRRYRTQVDPGLADQLIHQYYFDCFSESAIRNALLGRTVSPSCKYQAGHNKVGSLQYLALTALITPKKIKPPLPSVTKLTEDRWNKPQKTKGHRGSHTMNGH

SEQ ID NO: 1389 - protein, 192 aa, Artificial
  HIV Vif
MESRWQVMIVWQVDRMRIRTWKSLVKHHMYISGKAKRWSYKHHYESTNPRVSSEVHIPLGDAKLVIKTYWGLHTGERDWHLGQGASIEWRKKGYSIQVDPGLADQLIHLYYFDCFSESAIRNAILGHIVSPRCEYQAGHNKVGSLQYLALAALITPKKTKPPLPSVTKLTEDRWNKPQKTKGHRESHTMNGH

SEQ ID NO: 1390 - protein, 192 aa, Artificial
  HIV Vif
MENRWQVMIVWQVDRMRIKTWKSLVKHHMYISKKAKEWVYRHHYESTHPRISSEVHIPLGDAKLVITTYWGLHTGEREWHLGQGVSIEWRKKRYNTQVDPDLADKLIHLHYFDCFSDSAIRHAILGHRVRPKCEYQAGHNKVGSLQYLALTALITPKKIKPPLPSVRKLTEDRWNKPQKTKGHRGSHTMNGH

SEQ ID NO: 1391 - protein, 192 aa, Artificial
  HIV Vif
MENRWQVMIVWQVDRMRIRAWKSLVKHHMYKSKKAERWFYRHHYESTHPRISSEVHIPVGEARLVITTYWGLHTGERDWHLGQGVSIEWRKKRYSTQVDPGLADQLIHLYYFDCFSESAIRNAILGHVVSPRCEYQAGHNKVGSLQYLALAALIKPKKIKPPLPSVTKLTEDRWNKPQKTKGHRGSHTMNGH

SEQ ID NO: 1392 - protein, 192 aa, Artificial
  HIV Vif
MENRWQVMIVWQVDRMRIRAWKSLVKHHMYISKKAKGWLYKHHYESTHPRISSEVHIPLGDATLVITTYWGLHTGERDWHLGQGVSIEWRKRRYSTQVDPDQADQLIHLYYFDCFSESAIRKAIVGCRVSPRCEYQAGHNKVGSLQYLALTALVQPKKIKPPLPSVVKLTEDRWNKPQKTKGHRGSHTMHGH

SEQ ID NO: 1393 - protein, 192 aa, Artificial
  HIV Vif
MENRWQVMIVWQVDRMRIRTWISLVKHHMYISRKAKGWFYRHHYESTHPKISSEVHIPLGDARLVITTYWGLHTGERDWHLGHGVSVEWRKKRYSTQVDPDLADQLIHLYYFDCFSESAIRNAILGHIVSPRCEYQAGHNKVGSLQYLALAALITPKRIKPPLPSVTKLTEDRWNKPQKTKGHRGSHTMNGH

SEQ ID NO: 1394 - protein, 192 aa, Artificial
  HIV Vif
MENRWQVMIVWQVDRMRIRTWKSLVKHHMYVSKKAKGWFYRHHYESTHPRISSEVHIPLGDASLVVTTYWGLHTGERDWHLGQGVSIEWRKRRYSTQVDPDLADQLIHLYYFDCFSESAIRNAILGHRVSPRCEYQAGHNKVGSLQYLALAALVTPRKIKPPLPSVAKLTEDRWNKSHKTKGHRGSHTMNGH

SEQ ID NO: 1395 - protein, 192 aa, Artificial
  HIV Vif
MENRWQVMIVWQVDRMRIRTWNSLVKHHMYISGKAKGWIYKHHYESTNPRVSSEVQIPLGDARLVITTYWGLHTGERDWHLGQGVSMEWRTRRYSTQVDPDLADQLIHLYYFDCFSESAIRNAILGHIVSPRCEYQAGHSKVGSLQYLALTALIKPKKIKPPLPSVKKLTEDRWNKPQKTKGHRGSHTMNGH

SEQ ID NO: 1396 - protein, 192 aa, Artificial
  HIV Vif
MENRRQVMIVWQADRMRIRTWKSLVKHHMYISKKAKGRFYRHHYESTHPRISSEVHIPLGDARLVITTYWGLHTGERDWHLGQGVSIEWRKKRYSTQVDPDLADHLIHLHYFDCFSDSAIRKAILGHRVSPICEFQAGHNKVGPLQYLALTALITPKKIKPPLPSVKKLTEDRWNKPQKTKGHRGSHTINGH

SEQ ID NO: 1397 - protein, 192 aa, Artificial
  HIV Vif
MENRWQVMIVWQVDRMRIRTWKSLVKHHMYISGKAKGWSYRHHYESTNPRISSEVHIPLGDAKLVVTTYWGLHTGERDWHLGQGVSIEWRKKRYSTQVDPGLADRLIHLYYFDCFSDSAIRKSILGHIVSPSCEYQAGHNKVGSLQYLALAALTTPRRIKPPFPSVTKLTEDRWNKPQKTKGHRGSHTMTGH

SEQ ID NO: 1398 - protein, 192 aa, Artificial
  HIV Vif
MENRWQVMIVWQVDRMRIRTWKSLVKHHMYISRKAKGWFYRHHYESTHPRISSEVHIPPGDERLVITTYWGLHTGERDWHLGQGVSIEWRKRRYSTQVDPDLADQLIHLYYFDCFSESAIRKPSLGHIVSPRCEYQAGHNKVGSLQYLALAALTTPKKIKPPLPSVKKLTEDRWNKPQKTKGHRGSHTMNGH

SEQ ID NO: 1399 - protein, 192 aa, Artificial
  HIV Vif
MENRWQVMIVWQVDRMRIRTWKSLVKHHMYISKKAKGWFYRHHYESTHPRVSSEVHIPLGDAKLVITTYWGLHTGEREWHLGQGVAIEWRKKKYSTQVDPGLADQLIHLHYFDCFSESAIKNAILGYRVSPRCEYQAGHNKVGSLQYLALAALITPKKTKPPLPSVKKLTEDRWNKPQKTKGHRGSHTMNGH

SEQ ID NO: 1400 - protein, 192 aa, Artificial
  HIV Vif
MENRWQVMIVWQVDRMRIRTWKSLVKHHMYISKKAKGWSYRHHYESTHPRISSEVHIPLGEGKLVITTYWGLHTGERDWHLGQGVSIEWRKQRYSTQVDPDLADQLIHLYHFDCFSESAIRNAILGHLVIPRCEYQAGHNKVGSLQYLALTALITPKKIKPPLPSVKKLTEDRWNKPQKTKGHRGSHTMNGH

SEQ ID NO: 1401 - protein, 192 aa, Artificial
  HIV Vif
  misc_feature (29)..(29): Xaa can be any naturally occurring amino acid
  misc_feature (39)..(39): Xaa can be any naturally occurring amino acid
  misc_feature (41)..(41): Xaa can be any naturally occurring amino acid
  misc_feature (157)..(157): Xaa can be any naturally occurring amino acid
  misc_feature (176)..(176): Xaa can be any naturally occurring amino acid
MENRWQVMIVWQVDRMRIRTWKSLVKHHXHISGKARRWXYXHHYENNHPRISSEVHIPLGDAMLVITTYWGLHTGERDWHLGQGVSIEWRKQNYRTQVTPDLADQLIHRYYFDCFSEPAIRNTIVGRIVSPRCEYQTGHNKVGSLQYLALTALIKPXKIKPPLPSVKKLTEDRWNXPQKTKGHRGSHTMNGH

SEQ ID NO: 1402 - protein, 192 aa, Artificial
  HIV Vif
MENRWQVMIVWQVDRMRIRAWKSLVKHHMYISGKARGWFYRHHYESPHPRISSEVHIPLGDAKLVITTYWGLHTGERDWHLGQGVSIEWRKKRYSTQVDPDLADQLIHLYYFDCFSESAIRKAILGYRVSPRCEYQAGHNKVGSLQYLALTALITPKKTKPPLPSVKKLTEDRWNKPQKTKGHRGSRTMNGH

SEQ ID NO: 1403 - protein, 192 aa, Artificial
  HIV Vif
MENRWQVVIVWQVDRMRINTWKSLVKYHMHVSKKAKRWFYRHHFESRHPRVSSEVHIPLEEAKLVITTYWGLHTGERDWHLGQGVSIEWRQGRYRTQIDPGLADQLIHIYYFDCFSESAIRKAILGHRISPRCDYQAGHNKVGSLQYLALTALIKPKKRKPPLPSVKKLTEDRWNKPQKTKDHRGSHTMNGH

SEQ ID NO: 1404 - protein, 192 aa, Artificial
  HIV Vif
MENRWQVLIVWQVDRMKIRTWNSLVKHHMYVSRRASGWYYRHHYESRHPKISSEVHIPLGEARLVIITYWGLQTGERDWHLGHGVSIEWRLRRYSTRVDPGLADQLIHMHYFDCFADSAIRKAILGHRVSSRCDYQAGHNKVGSLQYLALTALIKPKKIKPPLPSVKKLVEDRWNKPQKTRDRRGNHTMNGH

SEQ ID NO: 1405 - protein, 192 aa, Artificial
  HIV Vif
MENRWQVLIVWQVDRMKIRTWNSLVKHHMYVSRKANGWFYRHHYESRHPRVSSEVHIPLGDARLVIKTYWGLQTGERDWHLGHGVSIEWRLRRYSTQVDPGLADQLIHMHYFDCFADSAIRKAILGQIVSPRCEYQAGHNKVGSLQYLALTALIKPKKRKPPLPSVRKLVEDRWNEPQKTRGRRGNHTMNGH

SEQ ID NO: 1406 - protein, 191 aa, Artificial
  HIV Vif
MENRWQVLIVWQVDRMRIRTWTSLVKHHMYVSRRANGWSYRHHFESRHPKVSSEVHIPLGEARLVIKTYWGLHTGERDWHLGHGVSIEWTVRGYSTVDPGLADQLIHMHYFDCFTDSAIRKALLGQVVIPRCDYQAGHNKVGSLQYLALTALIKPKKIKPPLPSVRKLVEDRWNKPQKTRGRRGNHTMNGH

SEQ ID NO: 1407 - protein, 192 aa, Artificial; identical to SEQ ID NO: 1335
  HIV Vif

SEQ ID NO: 1408 - protein, 191 aa, Artificial; identical to SEQ ID NO: 1336
  HIV Vif

SEQ ID NO: 1409 - protein, 192 aa, Artificial
  HIV Vif
MENRWQVLIVWQVDRMKIRTWNSLVKHHMHISRRANGWVYRHHYDSRHPKVSSEVHIPLGEARLIIKTYWGLQTGERDWHLGHGVSIEWRLRSYNTQVDPGLADHLIHMHYFDCFAESAIRKAILGYRVSPRCDYQAGHNKVGSLQYLALTALIKPKKAKPPLPSVSKLVEDKWNKPQKTRGRRGNHTMNGH

SEQ ID NO: 1410 - protein, 192 aa, Artificial
  HIV Vif
MENRWQVLIVWQVDRMKIRTWNSLVKHHMYVSRRAKGWFYRHHYDSRHPKVSSEVHIPLGEARLVIKTYWGLQTGERDWHLGHGVSIEWRLRRYNTQIEPGLADQLIHMHYFDCFADSAIRKAILGHIVIPRCDYQAGHNKVGSLQYLALTALIKPKKIKPPLPSIKKLVEDRWNNPQKIRGRRGNHTMNGH

SEQ ID NO: 1411 - protein, 192 aa, Artificial
  HIV Vif
MENRWQVLIVWQVDRMKIRTWNSLVKHHMYVSRRANGWFYRHHYESRHPKVSSEVHIPLGEATLVIKTYWGLQTGERDWHLGHEVSIEWRLRRYNTQIEPGLADQLIHMHYFDCFTDSAIRKAILGHIVIPRCDYQAGHNKVGSLQYLALTALIKPKKIKPPLPSIKKLVEDRWNNPQKIRGRRGNHTMNGH

SEQ ID NO: 1412 - protein, 192 aa, Artificial
  HIV Vif
MENRWQVLIVWQVDRMKIRTWNSLVKHHMYVSRRATGWFYRHHYESRNPKISSEVHIPLGEARLVIKTYWGLQTGERDWHLGHGVSIEWRLRRYSTQVEPGLADQLIHMHYFDCFADSAIRKAILGHIVIPRCDYQAGHNKVGSLQYLALTALIKPKKIKPPLPSVRKLVEDRWNNPLKTRGRRGNHTMNGH

SEQ ID NO: 1413 - protein, 192 aa, Artificial
  HIV Vif
MENRWQVLIVWQVDRMKIRTWNSLVKHHMYVSRRANGWFYRHHYDSRNPKVSSEVHIPLGEAILVIKTYWGLQTGERDWHLGHGVSIEWRLRRYNTQIEPGLADQLIHMHYFDCFADSAIRKAILGRIVIPRCDYQAGHNKIGSLQYLALTALIKPKKIKPPLPSIKKLVEDRWNNPQKIRGRRGNHTMNGH

SEQ ID NO: 1414 - protein, 192 aa, Artificial
  HIV Vif
MENRWQVLIVWQVDRMKIRTWNSLVKHHMYVSRRANGWFYRHHYESRHPKVSSEVHIPLGEARLVITTYWGLQTGERDWHLGHGVSIEWRLRKYSTQVEPGLADQLIHMHYFDCFADSAIRKAILGHIVIPRCDYQAGHNKVGSLQYLALTALIKPKKIKPPLPSIKKLVEDRWNNPQKIRGRKGNHIMHGH

SEQ ID NO: 1415 - protein, 192 aa, Artificial
  HIV Vif
MENRWQVMIVWQVDRMRIRTWYSLVKHHMYISKKAKNWFYRHHYESQHPKVSSEVHIPIGDARLVIRTYWGLHTGEKDWHLGHGVSIEWRQRKYSTQVDPDLADRQIHLQYFDCFSDSAIRKAMLGQVVRPRCEYPTGHNKVGSLQYLALKALATPKKTRPPLPSVRKLTEDRWNKPQKTRGHRENPTMNGH

SEQ ID NO: 1416 - protein, 191 aa, Artificial
  HIV Vif
MENRWQVMIVWQVDRMRIRAWNSLVKHHMYSSKKAAKWFYRHHYESQHPKVSSEVHIPLGDARLIIRTYWGLHTGEKDWHLGHGVSIEWRQRKSTQIDPDLADQLIHLQYFDCFSDSAIRKALLGQIVRPRCEYPAGHNKVGSLQYLALKALTKTKKTKPPLPSVRKLTEDRWNKPQKTKGHRESPTMNGH

SEQ ID NO: 1417 - protein, 192 aa, Artificial
  HIV Vif
MENRWQVMIVWQVDRMRIKTWNSLVKHHMYISKKAKKWVYRHHYESQHPKVSSEVHIPLGEARLVIRTYWGLHTGEKDWHLGHGVSIEWRQEKYSTQIDPDLADRLIHLQYFDCFSESAIRKAILGQVVRPRCDYPEGHNKVGSLQYLALKALATPKKIRPPLPSVRKLTEDRWNKPQKTRGHRENPTMSGH

SEQ ID NO: 1418 - protein, 192 aa, Artificial
  HIV Vif
MENRWQVMIVWQVDRMRIRTWNSLVKHHMYISKKAKKWFYRHHYESQHPKVSSEVHIPLGEARLVIRTYWGLQTGEKDWQLGHGVSIEWRQRNYSTQIDPDLADRLIHLQYFDCFSDSAIRRAILGQVVRRRCEYPSGHNKVGSLQYLALKALTTPKRIRPPLPSVKKLTEDRWNKPQKIWGHRENPTMNGH

SEQ ID NO: 1419 - protein, 192 aa, Artificial
  HIV Vif
MENRWQVMIVWQVDRMRIRTWNSIVKHHMYISKKAKKWFYRHHYESQHPKVSSEVHIPLGEARLVIRTYWGLQTGEKDWQLGHEVSIEWRQRTYSTQIDPDLADQLIHLQYFDCFSDSAIRKAILGQVVRRRCEYPSGHNKVGSIQYLALKALTTPKRIKPPLPSVKKLTEDRWNKPQKIRDHREYRTMNGH

SEQ ID NO: 1420 - protein, 192 aa, Artificial
  HIV Vif
MENRWQVMIVWQVDRMRIRTWNSLVKHHMYISKKAKQWFYRHHYESQHPKVSSEVHIPLGEARLVIRTYWGLQTGEKDWQLGHGVSIEWRQRKYSTQIDPDLADQLIHLQYFDCFSDSTIRRAILGQVVRRRCEYPSGHNKVGSLQYLALKALTTPKRIRPPLPSVKKLTEDRWNKPQKIKGHRENPTMNGH

SEQ ID NO: 1421 - protein, 191 aa, Artificial
  HIV Vif
MENRWQVMIVWQVDRMRIRTWNSLVKHHMYVSKKAKKWFYRHHYESQNPKVSSEVHIPLEEAKLIIRTYWGLQTGEKDWQLGHGVSIEWRQRTYSTQIDPDLADQLIHLHYFDCFSDSAIRRAILGQVVRRRCEYPSGHNKVGSLQYLALKALTTPKRIRPPLPSVKKLTEDRWNKHQKGDHRENPTMNGH

SEQ ID NO: 1422 - protein, 190 aa, Artificial
  HIV Vif
MENRWQVMIVWQVDRMRIRTWNSLVKHHMYISKKAKKWFYRHHYESQHPKVSSEVHIPLGEARLVIRTYWGLQTGEKDWHLGHGVSIEWRQRKYSTQIDPDLADKLIHLQYFGCFSDSAIRKAILGQVVRRRCEYPSGHNKVGSLQYLALKALTTPKRIRPPLPSVEITEDRWNKPQKRGHRENPTMNGH

SEQ ID NO: 1423 - protein, 192 aa, Artificial
  HIV Vif
MENRWQVMIVWRVDRMRIRTWNSLVKHHMYISKKAKNWFYRHHYESQHPKVSSEVHIPLGEAKLVIRTYWGLQTGEKDWQLGHGVSIEWRQRKYSTQIDPDLADQLIHLQYFDCFSDSAIRKAILGQVVRRRCEYPSGHNKVGSLQYLALKALTTPKRIKPPLPSVRKLTEDRWNEPQKIRGHREYPTMNGH

SEQ ID NO: 1424 - protein, 192 aa, Artificial
  HIV Vif
MENRWQVMIVWQVDRMRIRTWNSLVKHHMYISRKAKNWFYRHHFESRHPKVSSEVHIPLGDARLIVRTYWGLHAGERDWHLGHGVSIEWKQRKYSTQIDPDLADQLIHLHYFDCFAESAIRKAILGEVVRPRCEYQAGHKQVGSLQYLALKALVTPAKTKPPLPSVKKLAEDRWNKPQKTRGHRGNRSMNGH

SEQ ID NO: 1425 - protein, 192 aa, Artificial
  HIV Vif
MENRWQVMIVWQVDRMRIRTWNSLVKHHMYISRKAKNWFYRHHFESRHPKVSSEVHIPLGDARLIVRTYWRLHAGERDWYLGHGVSIEWKQRKYSTQIDPDLADQLIHLHYFDCFTDSAIRKAILGQVVSPRCEYQAGHNQVGSLQYLALKALVTPVKTKPPLPSVKKLAEDRWNKPQKTRGHRGNRSMNGQ

SEQ ID NO: 1426 - protein, 192 aa, Artificial
  HIV Vif
MENRWQVMIVWQVDRMRIRTWNSLVKHHMYVSRKAKDWFYRHHYESRHPKVSSEVHIPLGDARIVVRTYWGLHTGERDWHLGHGVSIEWRQKRYSTQIDPDLADQLIHLHYFTCFSESAIRKAILGEVVRPRCEYQAGHNKVGSLQYLALKALVTPTRKKPPLPSVRKLAEDRWNEPQKTRGHRGSRPMNGR

SEQ ID NO: 1427 - protein, 192 aa, Artificial
  HIV Vif
MENRWQVMIVWQVDRMRIRTWNSLVKHHMYVSKKAKGWFYRHHFESRHPKVCSEVHIPLGDARLVVRTYWGLHTGERDWHLGHGVSIEWKQKRYSTQIDPDLADQLIHLYYFNCFSDSAIRKAILGEIVRPRCEYQAGHNKVGSLQYLALNALVAPTKTKPPLPSVRKLAEDRWKEPQKTRGHRGSRPMNGH

SEQ ID NO: 1428 - protein, 192 aa, Artificial
  HIV Vif
MENRWQVMIVWQVDRMRIRTWNSLVKYHMYKSRKAKDWFYRHHYESSHPRVSSEVHIPLGDARLVVRTYWGLHTGERDWHLGHGVSIEWKQRRYSTQIDPDLADQLIHLHYFDCFSDSAIRKAILGQIVRPRCEYQAGHTKVGSLQYLALKALVTPTRTKPPLPSVKKLAEDRWNEPQKTRGHRGSRSMNGH

SEQ ID NO: 1429 - protein, 192 aa, Artificial
  HIV Vif
MENRWQVMIVWQVDRMRIRTWNSLVKHHMYVSKKAHRWFYRHHYESRHPKVSSEVHIPLGDATLIVRTYWGLQPGERDWHLGHGVSIVWQQKRYSTQIDPDLADQLIHLHYFDCFSESAIRKALLGQVVRPKCEYQAGHNKVGSLQYLALKALVTPTRRKPPLPSVKKLAEDRWNEPQKTRGHRGNRSMNGH

SEQ ID NO: 1430 - protein, 192 aa, Artificial
  HIV Vif
MENRWQVMIVWQVDRMRIRTWNSLVKHHIYISKKARGWVYKHHYESRNPRISSEVHIPLGDAKLVIKTYWGLHTGERDWHLGQGASIEWRKERYSTQVDPNLADQLIHLYYFDCFSESAIRNAILGHRVSPSCEYRAGHNKVGSLQYLALAALRTPKKIKPPLPSVTKLTEDRWNKPQRTKDHRGSHTMSGH

SEQ ID NO: 1431 - protein, 192 aa, Artificial
  HIV Vif
MENRWQVMIVWQVDRMRIRTWNSLVKHHIYISKKARGWVYKHHYESRNPRISSEVHIPLGDAKLVIKTYWGLHTGERDWHLGQGASIEWRKERYSTQVDPNLADQLIHLYYFDCFSDSAIRNAILGHRVSPSCEYRAGHNKVGSLQYLALAALRTPKKIKPPLPSVTKLTEDRWNKPQRTKDHRGSHTMSGH

SEQ ID NO: 1432 - protein, 191 aa, Artificial
  HIV Vif
MANRWQVMIVWQVDRMKIRTWNSLVKHHMYVSKKAKGFYRHHYESRHPKVSSEVHIPLGEARLVVRTYWGLQPGEQDWHLGHGVSIEWRLRRYSTQVDPDLADQLIHMHYFDCFSESAIRKAILGHRVSPRCEYQAGHNKVGSLQYLALAALISPKKTKPPLPSVKKLVEDRWNKPQKTRGRRENQIMNGH

SEQ ID NO: 1433 - protein, 192 aa, Artificial
  HIV Vif
MENRWQVMIVWQVDRMKIRTWNSLVKHHMYISKKAKGWSYRHHYESRHPRVSSEVQIPLGDARLVIRTYWGLQPGEKDWHLGHGVSMEWRLRRYSTQVDPDLADQLIHMHYFDCFSESAIRQAILGYRVSPRCEYQAGHNEVGSLQYLALAALISPKKTKPPLPSVKKLVEDRWNKPQKTRGRRENQIMNGH

SEQ ID NO: 1434 - protein, 192 aa, Artificial
  HIV Vif
  misc_feature (88)..(88): Xaa can be any naturally occurring amino acid
MENRWQVMTVWQVDRMKIRTWNSLVKHHMHISKKAKGWVYKHHYESRNPRASSEVHIPLGEAKLVVRTYWGLQPGKKDWHLGHGVSIXWRLRSYSTQVDPDLADQLIHVHYFDCFSESAIRKAILGHRVSPRCEYQAGHNKPGSLQYLALAALISPKKTKPPLPSVKKLVEDRWNKSQKTKGRRESHIMNGH

SEQ ID NO: 1435 - protein, 192 aa, Artificial
  HIV Vif
MENRWQVMIVWQVDRMRINTWKSLVKYHMHVSKKANRWCYRHHFESRNPRISSEVHIPLGDAKLVVTTYWGLHTGERDWHLGQGVSIEWRKRRYSTQVDPSLADQLIHVYYFDCFSESAIRNAILGRIVSPRCEFQAGHNKVGSLQYLALTALITPKKTKPPLPSVRKLTEDRWNKPQKTKGRRGNHTMNGY

SEQ ID NO: 1436 - protein, 192 aa, Artificial
  HIV Vif
MENRWQVMIVWQVDRMRINTWKSLVKYHMHVSKKTKAWFYRHHYESRHPRISSEVHIPLEEAKLVIITYWGLHTGEREWHLGQGVSIEWRKGRYSTQIDPGLADQLIHMYYFDCFSESAIRKAILGYRVSPRCEYQAGHNKVGSLQYLALTALITPQKIKPPLPSVRKLTEDRWNKPQRTKGHRGCHTMNGY

SEQ ID NO: 1437 - protein, 192 aa, Artificial
  HIV Vif
MENRWQVMIVWQVDRMRINTWKSLVKYHMHISKKAKRWNYRHHYDSNHPKISSEVHIPLGSAELVITTYWGLNTGERKWHLGQGVSIEWRLRRYRTQVDPSMADQLIHIHYFDCFSESAIRKALLGHRVSPRCDYQAGHNKVGSLQYLALTALIKPEKRKPPLPSVQKLVEDRWNKPQKTRGHRESHTMNGH

SEQ ID NO: 1438 - protein, 192 aa, Artificial
  HIV Vif
MENRWQVMIVWQVDRMRINTWKSLVKYHMHISKKAKRWTYRHHYDSNHPKVSSEVHIPLGCAELVITTYWGLNTGERKWHLGQGVSIEWRLRRYRTQVDPGLADQLIHMHYFDCFSESAIRKAILGQIVSPQCDYQAGHNKVGSLQYLALTALIKPKKRKPPLPSVQKLVEDRWNKPQKTRDHRESHTMNGH

SEQ ID NO: 1439 - protein, 192 aa, Artificial
  HIV Vif
MENRWQVMIVWQVDRMRINAWKSLVKYHMNVSKKAKGWLYRHHYDSNHPKISSEVHIPLGCAELVVTTYWGLNTGEREWHLGQGVSIEWRLKKYRTQVDPSLADQLIHMHYFDCFSESAIRKAILGHVVSPKCDYQAGHNKVGSLQYLALTALIKPRKRKPPLPSVQKLVEDRWNKPQKTRDHRECHTMNGH

SEQ ID NO: 1440 - protein, 192 aa, Artificial
  HIV Vif
MENRWQVMIVWQVDRMRINTWKSLVKYHMHISKKARKWAYRHHYDSHHPKISSEVHIPLGKAELVVTTYWGLNTGERKWHLGQGVSIEWRLKRYRTQVDPSLADQLIHMHYFDCFTESAIREAILGHIVSPRCDFEAGHNKVGSLQYLALKALVKTKRRKPPLPSVQKLVEDRWNKPQKTKDHRESHIMDGH

SEQ ID NO: 1441 - protein, 192 aa, Artificial
  HIV Vif
MENRWQVMIVWQVDRMRIRTWHSLVKHHMYVSKKARRWMYRHHYESRHPKISSEVHIPLGDADLVVTTYWGLHTGEREWHLGQGVSIEWRMKRYRTQVDPGLADQLIHIHYFDCFSESAIREAILGHRVSPRCEYQAGHNQVGSLQYLALKALVTPTRAKPPLPSVRKLAEDRWNKPQKTRGHRGNHTANGC

SEQ ID NO: 1442 - protein, 192 aa, Artificial
  HIV Vif
MENRWQVMIVWQVARMRIRTWNSLVKHHMYVSKKAKGWLYRHHYESRHPRVSSEVHIPLEEDMLVVTTYWGLHTGEREWHLGQGVSIEWRRKRYRTQVDPELADQLIHMHYFDCFAESAIRKAILGHRVSPRCEYPAGRNKVGSLQYLALKALVTPKRTKPPLPSVRKLTEDRWNKPQKTRGRRGNHTVNGC

SEQ ID NO: 1443 - protein, 192 aa, Artificial
  HIV Vif
MENRWQVMIVWQVDRMRINTWKSLVKYHMHISKKAKGWFYRHHYDSPHPKISSEVHIPLGDARLVVTTYWGLHTGEREWHLGQGVSIEWRKRRYSTQVDPGLADQLIHMYYFDCFADSAIRKAILGHIVSPRCEYQAGHNKVGSLQYLALTALIAPKKRKPPLPSVKKLTEDRWNKPRQTKGRRGSHTMNGH

SEQ ID NO: 1444 - protein, 192 aa, Artificial
  HIV Vif
MENRWQVMIVWQVDRMRIKTWKSLVKHHMYVSKKANRWFYRHHYESPHPKISSEVHIPLGEARLVIKTYWGLHTGEREWHLGQGVSIEWRKRRYSTQVDPGLADQLIHMYYFDCFSESAIRKAILGDIVSPRCEYQAGHNKVGSLQYLALTALIAPKQIKPPLPSVRKLTEDRWNKPQQTRGHRGSHTMNGH

SEQ ID NO: 1445 - protein, 192 aa, Artificial
  HIV Vif
MENRWQVMIVWQVDRMRINTWKSLVKYHMYVSKKANRWFYRHHYDSHHPKISSEVHIPLGEARLVVTTYWGLHTGEKEWHLGQGVSIEWRKRRYSTQVDPGLADQLIHMYYFDCFAESAIRKAILGHIVSPSCEYQAGHNKVGSLQYLALAALIAPKKIKPPLPSVRKLTEDRWNKPQKTKGRRGSHTMNGH

SEQ ID NO: 1446 - protein, 192 aa, Artificial
  HIV Vif
MENRWQVMIVWQVDRMRIRTWKSLVKHHMYISKKAKGWLYRHHYDCPNPKISSEVHIPLGEARLVVKTYWGLHTGEREWHLGQGVSIEWRKGRYNTQIDPGLADQLIHIYHFDCFAESAIRKAILGQVVYPRCNYQAGHNKVGSLQYLALTALVTPRKIKPPLPSVGKLTEDRWNKPQRTKGHRGSHTMNGH

SEQ ID NO: 1447 - protein, 192 aa, Artificial
  HIV Vif
MENRWQLMIVWQVDRMRINTWKSLVKYHMYVSKKAKGWSYRHHFQSRHPRVSSEVHIPLEEVKLVITTYWGLHPGEREWHLGQGVSIEWRQGKYRTQIDPGLADQLIHIYYFDCFSESAIRKAILGHRISPRCNYQAGHNKVGSLQYLALTALIAPEKTKPPLPSVQKLVEDRWNKPQETRGHRGSHTMNGH

SEQ ID NO: 1448 - protein, 192 aa, Artificial
  HIV Vif
MENRWQVMIVWQVDRMRINTWKSLVKYHMHISKKAKGWFYRHHFESRHPKISSEVHIPLETAELVITTYWGLLPGEREWHLGQGVSIEWRQGRYRTQIDPGLADQLIHIYYFDCFSESAIRKAILGHKISPRCNYQAGHNKVGSLQYLALTALIAPKKTKPPLPSVQKLVEDRWNKPQKTRGHRESHTMNGH

SEQ ID NO: 1449 - protein, 192 aa, Artificial
  HIV Vif
MENRWQVTIVWQVDRMRINTWKSLVKYHMHVSKKAKRWFYRHHFESRHPKISSEVHIPLEEAELVITTYWGLNTGERDWHLGQGVSIEWRQGRYRTQIDPGLADQLIHIYYFDCFSESAIRKAILGHRISPRCDYQAGHNKVGSLQYLALTALVSPKKAKPPLPSVKKLVEDRWNKPQEIRGHRGSHTMNGH

SEQ ID NO: 1450 - protein, 192 aa, Artificial
  HIV Vif
MENRWQVMIVWQVDRMRISTWKSLVKYHMHVSKKAKNWFYRHHFQSRHPKISSEVHIPLEEAKLVVTTYWGLHTGERDWHLGQGVSIEWRQGRYRTQIDPDLADQLIHIYYFDCFSASAIRKAILGHRISPRCNYQAGHNKVGSLQYLALTALIAPKKTKPPLPSVKKLVEDRWNKPQETRGHRGSHTMNGH

SEQ ID NO: 1451 - protein, 193 aa, Artificial
  HIV Vif
MENRWQVMIVWQVDRMKIRTWNSLVKHHMYISKRAAGWFYRHHYESRHPRVSSEVHIPLEEDSKLVIITYWGLHTGERDWHLGQGVSIEWRQKRYRTQVDPGLADQLIHLHYFDCFSDSAIRKAILGQRVSPRCNYQAGHNKVGSLQYLALTALITPKKIKPPLPSVRKLVEDRWNNPQKTRGHRGSHTMNGH

SEQ ID NO: 1452 - protein, 192 aa, Artificial
  HIV Vif
MENRWQVMIVWQVDRMRIKTWNSLVKHHMYVSRKTKGWSYRHHYESINPRVSSEVHIPLKEAKLVVTTYWGLNTGERDWHLGQGVSIEWRLKKYSTQIDPGLADQLIHMHYFDCFTDSAIRKALIGLRVSPRCEYQAGHNKVGSLQYLALTALVAPKKTKPPLLSVRKLVEDRWNKPQKTRDHRGSHTMNGH

SEQ ID NO: 1453 - protein, 192 aa, Artificial
  HIV Vif
MENRWQVMIVWQVDRMRIRTWNSLVKHHMYISKKAKGWFYRHHYESRHPKVSSEVHIPLGDAKLVVRTYWGLHTGDKEWHLGHGVSIEWRQGRYSTQVDPDLADHLIHLHYFNCFSESAIRKAILGQTVRPSCEYPAGHNKVGSLQYLALKVLVAPTRRRPPLPSVRKLTEDRWNEPQKTRGHRENPTMNGH

SEQ ID NO: 1454 - protein, 192 aa, Artificial
  HIV Vif
MENRWQVVIVWQVDRMRIRTWNSLVKHHMYVSKKAKGWFYRHHYESRHPRVSSEVHIPLRDATLVVRTYWGLHAGEKDWQLGHGVSIEWRQKRYSTQIDPNTADHLIHLYYFDCFSESAIRKAILGEIVSPRCEYPAGHNKVGSLQYLASKALVTPTRKRPPLPSVGKLAEDRWNKPQKTRDHRENPTMNGH

SEQ ID NO: 1455 - protein, 192 aa, Artificial
  HIV Vif
MENRWQVMIVWQVDRMRIRTWHSLVKHHMYVSKKARGWFYRPHYASRHPRVSSEVHIPLGDATLVVTTYWGLHTGEKDWQLGHGVSIEWRQRRYRTQVEPDLADHLIHLHYFDCFSDSAIRKAILGQIVSPRCEYQAGHNQVGSLQYLALKVLVTSKRSRPPLPSVTELAEDRWNKPQKTRGHRENPTMNGH

SEQ ID NO: 1456 - protein, 192 aa, Artificial
  HIV Vif
MENRWQVMIVWQVDRMRIKTWNSLVKHHMYVSKKAKKWVYRHHYESTNPKTSSEVHIPVGDARLVITTYWGLHTGERDWHLGHGVSIEWRQERYSTQIDPDLADQLIHLHYFDCFSDSAIRKAILGHRVSPICDYQAGHRKVGSLQYLALTALISPKRTKPPLPSVRKLVEDRWNKPQKTRGHRGSHTMNGH

SEQ ID NO: 1457 - protein, 192 aa, Artificial
  HIV Vif
MENRWQVMIVWQVDRMRINKWKSLVKYHMYISKKANRWVYRHHYDSPHPRISSEVHIPLGDARLVITTYWGLHTGERDWHLGQGVSIEWRQKRYSTQVDPGLADQLIHTHYFDCFSESAIRGAILGRVVSPRCEYQAGHNQVGSLQYLALTALVAPKKTKPPLPSVKKLVEDGWNKPQKTRGHRGSHTMNRH

SEQ ID NO: 1458 - protein, 192 aa, Artificial
  HIV Vif
MENRWQVMIVWQVDRMRINTWKSLVKYHMHISRKARGWFYRHHFESTHPRISSEVHIPLGEARLVITTYWGLNTGEREWHLGQGVSIEWRLKRYSTQVEPGLADQLIHMHYFDCFSESAIRKAILGRVVRPRCNYPAGHKQVGTLQYLALTALVAPKKIKPPLPSVRKLVEDRWNKPQKTRGHRGSHTMNGH

SEQ ID NO: 1459 - protein, 192 aa, Artificial
  HIV Vif
MENRWQVMIVWQVDRMRINTWKSLVKYHMNVSKKARQWLYRHHYDSRHPKISSEVHIPLGEARLVVTTYWGLQTGERDWHLGQGVSIEWRRKRYRTQVDPGLADQLIHMHYFDCFSDSAIRKAILGQIVSPRCDYQAGHNKVGSLQYLALTALIKPKRRKPPLPSVQKLVEDRWNKPQKTRDHRESHTMNGH

SEQ ID NO: 1460 - protein, 192 aa, Artificial
  HIV Vif
MENRWQVMIVWQVDRMRINTWKSLVKYHMNVSKKARKWLYRHHYDSNHPKISSEVHIPLGEAILVITTYWGLQTGERDWHLGQGVSIEWRQRRYRTQVDPGLADQLIHMCYFDCFSDSAIRKAILGQIVSPRCDYQAGHNKVGSLQYLALTALIRPKRRKPPLPSVQKLVEDRWNKPQKTTGHRESHTMNGH

SEQ ID NO: 1461 - protein, 192 aa, Artificial
  HIV Vif
MENRWQVMIVWQVDRMRINTWKSLVKYHMYVSKKANRWRYRHHYDSNHPKISSEVHIPLGDAELVVTTYWGLHTGEREWHLGQGVSIEWRLKKYRTQVDPGLADQLIHIYYFDCFSESAIRKALLGHRVSPRCEYQAGHTQVGSLQYLALTALIAPKKTKPPVPSVQKLVEDRWNKPQKTRGHRGSHTMSGQ

SEQ ID NO: 1462 - protein, 192 aa, Artificial
  HIV Vif
MENRWQVMIVWQVDRMRINTWKSLVKYHMHISKKANRWYYRHHYESRHPKISSEVHIPLGDAELVVTTYWGLLTGERDWHLGQGVSIEWRLKRYRTQVEPDLADQLIHIYYFDCFSESAVRKAILGHRVSPRCECQAGHNKVGSLQYLALTALVAPRRPKPPVPSVKKLVEDRWNKPQKTRGHRGSQTMNGH

SEQ ID NO: 1463 - protein, 192 aa, Artificial
  HIV Vif
MENRWQVMVVWQVDRMKIRKWNSLVKHHMYVSKKAKGWYYRHHYETHHPKISSEVHIPVGQARLVTVTYWGLTTGEQSWHLGHGVSIEWRLRKYKTQVDPEMADKLIHLHYFDCFTASAIRQAVLGRPVLPRCEYPAGHKQVGTLQYLALTAWVGAKKRKPPLPSVTKLTEDRWNEHQKMQGHRGNPIMNGH

SEQ ID NO: 1464 - protein, 192 aa, Artificial [sequence omitted]

SEQ ID NO: 1465 - protein, 192 aa, Artificial
  HIV Vif
MENRWQVLIVWQIDRQKVKAWNSLVKYHKYMSKKAANWRYRHHYESRNPKVSSAVYIPVAEADIVVTTYWGLMPGEREEHLGHGVSIEWQYKEYKTQIDPETADRMIHLHYFTCFTESAIRKAILGQRVLTKCEYLAGHSQVGTLQFLALKAVVKVKRNKPPLPSVQRLTEDRWNKPWKIRDQLGSHSMNGH

SEQ ID NO: 1466 - protein, 192 aa, Artificial
  HIV Vif
MENRWQVLIVWQVDRQRVKTWNSLVKYHKYRSGKTRDWYYRHHFESRNPRVSSGVYIPVGGPWIVVTTYWGLMPGERDEHLGHGVSIEWRYKKYKTQIDPETADRMIHIYYFACFTESAIRKAILGQRVLTRCEYPAGHSQVGTLQLLALRVVVKEKRNKPPLPSVQKLTEDRWSRHLRIRDQLESHSMNGH

SEQ ID NO: 1467 - protein, 192 aa, Artificial
  HIV Vif
MENRWQVLIVWQVDRQRVKTWNSLVKYHKYRSGKTRDWYYRHHFESKNPRVSSGVYIPVGGPWIVVTTYWGLMPGERDEHLGHGVSIDWRYRKYTTQIDPETADRMIHTYYFACFTESAIRKAILGQRVLTRCEYSAGHSQVGTLQLLALRVVVKEKRHKPPLPSVQKLTEDRWSRHLRIRDQLGSHSMNGH

SEQ ID NO: 1468 - protein, 192 aa, Artificial
  HIV Vif
MENRWQVMIVWQVDRMRIKTWNSLVKHHMYISKKAKGWVYKHHYESTNPRISSEVHIPLGNARIVVTAYWGLHTGERDWHLGQGVSIEWRQGRYSTQIDPDLADQLIHLHYFDCFSDSAIRKAILGHIVSPRCEYQTGHNKVGSLQYLALTTLVAPTKRKPPLPSVRKLVEDRWNKPQKTKGHKGSHTMHGH

SEQ ID NO: 1469 - protein, 96 aa, Artificial
  HIV Vpr
MEQAPEDQGPQREPYNEWTLELLEELKQEAVRHFPRPWLHSLGQHIYNTYGDTWTGVEAIIRILQQLLFIHFRIGCQHSRIGIMRQRRTRNGASRS

SEQ ID NO: 1470 - protein, 96 aa, Artificial
  HIV Vpr
MEQAPEDQGPQREPYNEWTLEILEELKQEAVRHFPRPWLHNLGEYIYETYGDTWTGVEALIRVLQQLLFIHFRIGCSHSRIGIVRQRRARNGSSRS

SEQ ID NO: 1471 - protein, 96 aa, Artificial
  HIV Vpr
MEQPPEDQGPQREPYNEWTLEILEELKQEAVRHFPRPWLHSLGQYIYETYGDTWTGVETIIRTLQQLLFIHFRIGCQHSRIGILRQKRARNGASRS

SEQ ID NO: 1472 - protein, 96 aa, Artificial
  HIV Vpr
MEQPPEDQGPQREPYNEWTLELLEELKQEAVRHFPRPWLHSLGQHIYETYGDTWAGVEALLRILQQLLFIHFRIGCQHSRIGIIPQRRARNGSRRS

SEQ ID NO: 1473 - protein, 96 aa, Artificial
  HIV Vpr
MEQPPEDQGPQREPYNEWTLELLEELKQEAVRHFPRPWLHSLGQYIYENYGDTWAGVEAITRILQQLLFIHFRIGCQHSRIGILRQRRARNGANRS

SEQ ID NO: 1474 - protein, 95 aa, Artificial
  HIV Vpr
MEQAPEDQGPQREPYNEWALEILEELKQEAVRHFPRPWLHSIGQYIYETYGDTWTGVEALMRILQQLLFIHFRIGCQHSRIGILQRRARNGASRS

SEQ ID NO: 1475 - protein, 96 aa, Artificial
  HIV Vpr
MEQAPEDQGPQREPYNEWTLELLEELKQEAVRHFPRPWLHGLGQHIYETYGDTWTGVEAIIRILQQLLFIHYRIGCQHSRIGIVRQRRARNGANRS

SEQ ID NO: 1476 - protein, 96 aa, Artificial
  HIV Vpr
MEQPPEDQGPQREPYNEWTLELLEELIQEAVRHFPRPWLHSLGQYIYETYGDTWTGVEAIIKILQQLLFIHFRIGCQHSRIGILRQRRARNGASRS

SEQ ID NO: 1477 - protein, 96 aa, Artificial
  HIV Vpr
MEQAPEDQGPQREPYNEWTLELLEELKQEAVRHFPRPWLHSMGQHIYNTYGDTWAGVEAIIRILQQLLFIHFRIGCQHSRIGILRQRRTRNGASRS

SEQ ID NO: 1478 - protein, 95 aa, Artificial
  HIV Vpr
MEQAPEDQGPQREPYNETLELLEELKQEAVRHFPRIWLHNLGQYIYNTYGDTWTGVEAIIRTLQQLLFVHFRIGCQHSRIGIMRQRRARNGTSGS

SEQ ID NO: 1479 - protein, 96 aa, Artificial
  HIV Vpr
MEQPPEDQGPQRVPYNEWALELLEELKQEAVRHFPRPWLHGLGQYVYETYGDTWTGVEAIIRILQQLLFVHFRIGCQHSRIGILQQRRARNGASRS

SEQ ID NO: 1480 - protein, 96 aa, Artificial
  HIV Vpr
MEQPPEDQGPQREPYNEWALEILEELKQEAVRHFPRLWLHSLGQYIYETYGDTWAGVEALIRILQQLLFIHFRIGCQHSRIGILQQRRARNGASRS

SEQ ID NO: 1481 - protein, 96 aa, Artificial
  HIV Vpr
MEQAPEDQGPQRELYNEWTLELLEELKQEAARHFPSSWLHGLGQHIYNTYGDTWTGVEVLIRILQQLLFIHFRIGCQHSRIGIIRQRRTRNGASRP

SEQ ID NO: 1482 - protein, 96 aa, Artificial
  HIV Vpr
MEQAPEDQGPQREPYNEWTLELLEELKQEAVRHFPRTWLHNLGQYIYQTYGDTWTGVEALIRILQQPLFIHFRIGCQHSRIGITLPRRARNGANRS

SEQ ID NO: 1483 - protein, 96 aa, Artificial
  HIV Vpr
MEQAPEDQGPQREPYNEWTLEILEELKQEAVRHFPRPWLQSLGQYIYETYGDTWTGVEAIIRILQQLLFIHFRSGCAHSRIGTLPQRRARNGASRS

SEQ ID NO: 1484 - protein, 96 aa, Artificial
  HIV Vpr
MEQPPEDQGPQREPYNEWTLGLLEELKQEAVRHFPRLWLHNLGQYIYNTYGDTWTGVEAIIRILQQLLFIHFRIGCQHSRIGIIRQRRTRNGDSRS

SEQ ID NO: 1485 - protein, 96 aa, Artificial
  HIV Vpr
MEQAPEDQGPQREPYNEWALELLEELKQEAVRHFPRPWLHNLGQYIYETYGDTWTGVEALIRILQQLLFTHYRFGCQHSRIGILQQRRARNGANRS

SEQ ID NO: 1486 - protein, 96 aa, Artificial
  HIV Vpr
MEQAPEDQGPQRGPYNEWTLEILEELKQEAVRHFPRPWLHNLGQYIYETYGDTWTGVEVIIRILQQLLFIHFRIGCQHSRIGILRQRRTRNGASRS

SEQ ID NO: 1487 - protein, 83 aa, Artificial
  HIV Vpr
  misc_feature (83)..(83): Xaa can be any naturally occurring amino acid
MEQPPEDQGPQREPYNEWTLELLEELKQEAVRHFPRPWLHGLGQYIYETYGDTWAGVESLIRMLQHLLFIHFRIGCQHSRIDX

SEQ ID NO: 1488 - protein, 96 aa, Artificial
  HIV Vpr
MEQTPEDQGPQREPYNEWALEILEELKQEAVRHFPRTWLHSLGQYIYDTYGDTWAGVEAIIRILQQLLFTHFRIGCHHSRIGILRQRRARNGASRS

SEQ ID NO: 1489 - protein, 96 aa, Artificial
  HIV Vpr
MEQAPEDQGPQREPYNEWTLEILEELKQGAVRHFPRPWLHNLGQHIYETYGDTWAGVEALLRILQQLLFIHFRIGCQHSRIGILRQRRARNGASRP

SEQ ID NO: 1490 - protein, 96 aa, Artificial
  HIV Vpr
MEQVPEDQGPQREPYNEWTLEILEELKQEAVRHFPRPWLQGLGHYIYETYGDTWTGVETIIRILQQLLFIHFRIGCSRSRIGPMRQRRARNGASRS

SEQ ID NO: 1491 - protein, 96 aa, Artificial
  HIV Vpr
MEQVPEDQGPQREPYNEWTLEILEELKQEAVRHFPRPWLHNLGQYIYETYGDTWTGVEALLRVLQQLLFVHFRIGCQHSRIGILQQRRARNGSSRS

SEQ ID NO: 1492 - protein, 96 aa, Artificial
  HIV Vpr
MEQSPEDQGPQREPYNEWTLELLEELKQEAVRHFPRPWLHGIGQYIYETYGDTWTGVEAIIRILQQLLFIHYRIGCAHSRIGIVRQRRARNGANRS

SEQ ID NO: 1493 - protein, 96 aa, Artificial
  HIV Vpr
MEQFPEDQGPQREPYNEWTLELLEELKQEAVKHFPRPWLHNLGQHIYETYGDTWTGVEAIIRMLQQLLFIHFRIGCQHSRIGILRQRRARNGANRS

SEQ ID NO: 1494 - protein, 96 aa, Artificial
  HIV Vpr
MEQPPEDQGPQREPYNEWTLEVLEELKQEAVRHFPRPWLHSLGQYVYETYGDTWTGVEALIRMLQQLLFIHFKIGCQHSRIGILRRRRARNGASRS

SEQ ID NO: 1495 - protein, 96 aa, Artificial
  HIV Vpr
MEQPPEDQGPQREPYNEWALEILEELKQEAVRHFPRPWLHSLGQHIYETYGDTWTGVEALIRILQQLLFIHFRIGCQHSRIGIILQRRTRNGASRS

SEQ ID NO: 1496 - protein, 91 aa, Artificial
  HIV Vpr
MEQAPEDQGPQREPYNEWTLELLEELKQEAVRHFPRPWLHSLGQHIYETYGDTWMGVEALIRILQHFRIGCQHSRIGIILQRRTRNGASRS

SEQ ID NO: 1497 - protein, 96 aa, Artificial
  HIV Vpr
MERPPEDQGPQREPYNEWTLELLEELKQEAVRHFPRPWLHGLGQYIYETYGDTWTGVENMIRILQQLLFVHFRIGCQHSRIGILQQRRARNGASRS

SEQ ID NO: 1498 - protein, 96 aa, Artificial
  HIV Vpr
MERAPEDQGPQREPYNEWALELLEELKQEAVRHFPRMWLHGLGQYIYETYGDTWTGVEALIRTLQQLLFIHFRIGCQHSRIGILRQRRVRNGTNRS

SEQ ID NO: 1499 - protein, 96 aa, Artificial
  HIV Vpr
MEQAPEDQGPQREPYNEWTLELLEELKQEAVRHFPGPWLHGLGQYVYETYGDTWTGVETLIRILQQLLFIHFRIGCQHSRIGILRQRRTRNGASRS

SEQ ID NO: 1500 - protein, 96 aa, Artificial
  HIV Vpr
MEQAPEDQGPQREPYNEWTLEILEELKQEAVRHFPPPWLHSLGQYIYETYGDTWTGVETIIRILQQLLFIHFRIGCQHSRIGILQQRRARNGASRP

SEQ ID NO: 1501 - protein, 96 aa, Artificial
  HIV Vpr
MEQAPEDQGPQREPYNEWTLELLEELKQEAVRHFPRPWLHSLGQHIYNTYGDTWTGVEAIIRILQQLLFIHFRIGCQHSRIGIIRQRRTRNGASRP

SEQ ID NO: 1502 - protein, 96 aa, Artificial
  HIV Vpr
MEQAPEDQGPQREPYNEWTLELLEELKQEAVRHFPRPWLHSLGQYIYETYGDTWTGVEVLTRILQQLLFIHFRIGCQHSRIGILRQRRTRNGASRS

SEQ ID NO: 1503 - protein, 96 aa, Artificial
  HIV Vpr
TEQAPEDQGPQREPYNEWALEILEELKQEAVRHFPRPWLHSLGQYIYETYGDTWTGVEAIIRILQQLLFIHFRIGCLHSRIGIMRQRRARNGASRS

SEQ ID NO: 1504 - protein, 96 aa, Artificial
  HIV Vpr
MEQPPEDQGPQREPYTEWALELLEELKQEAVRHFPRPWLHGLGQYIYDTYGDTWTGVEIKIRILQQLLFIHFRIGCQHSRIGILQQRRARNGARRS

SEQ ID NO: 1505 - protein, 96 aa, Artificial
  HIV Vpr
MEQTPEDQGPQREPHNEWTLELLEELKQEAVRHFPRPWLHSLGQHIYETYGDTWAGVEALLRILQQLLFIHFRIGCHHSRIGITPQRRARNGSRRS

SEQ ID NO: 1506 - protein, 95 aa, Artificial
  HIV Vpr
MEQAPEDQGPQREPYNEWTLELLEELKQEAVRHFPRTLHDLGQHIYNTYGDTWTGVEAITRILQQLLFIHYRIGCQHSRIGIMRQRRARNGASRS

SEQ ID NO: 1507 - protein, 95 aa, Artificial
  HIV Vpr
MEQAPEDQGPQREPYNEWTLEILEELKQEAIRHFPIPYLQHLGQYIYETYGDTWAGVLAIIRILQQLLFIHFRIGCSHSRIGIWRRRARNGASRS

SEQ ID NO: 1508 - protein, 96 aa, Artificial
  HIV Vpr
MEQPPEDQGPQREPYNEWTLEILEELKQEAVRHFPRPWLHSLGQYIYETYGDTWTGVEAILRILQQLLFIHFRIGCQHSRIGILRQRRARNGASRS

SEQ ID NO: 1509 - protein, 96 aa, Artificial
  HIV Vpr
MEQAPEDQGPQREPYNEWTLELLEELKQEAVRHFPRIWLHNLGQYVYNTYGDTWTGVEAIIRILQQLLFIHFRIGCQHSRIGILRQRRTRNGASRS

SEQ ID NO: 1510 - protein, 96 aa, Artificial
  HIV Vpr
MEQAPEDQGPQREPYNEWTLEILEELKQEAVRHLPRPWLHSLGQHIYETYGDTWTGVEAIIRILQQLLFIHFRIGCQHSRIGILPRRRARNGSSRS

SEQ ID NO: 1511 - protein, 96 aa, Artificial
  HIV Vpr
MEQAPEDQGPQREPYNEWTLALLEDLKQEAVRHVPRPWLHSLGQHIYETYGDTWTGVEAIIRILQQLLFIHFRIGCQHSRIGILRQRRARNGANRS

SEQ ID NO: 1512 - protein, 96 aa, Artificial
  HIV Vpr
MEQAPEDQGPQREPYNEWTLELLEELKQEAVRHFPRPWLHSLGQYIYETYGDTWTGVEVIIRILQQLLFIHFRIGCQHSRIGILRQRRARNGANRS

SEQ ID NO: 1513 - protein, 96 aa, Artificial
  HIV Vpr
MEQAPEDQGPQREPYNEWTLELLEELKQEAVRHFPITWLHNLGQYIYETYGDTWTGVEALIRTLQQLLFIHFRIGCQHSRIGILRQRRARNGASRS

SEQ ID NO: 1514 - protein, 95 aa, Artificial
  HIV Vpr
MEQAPEDQGPQREPYNEWTLEILEELKQEAVRHFLRPWLHDLGQYIYETYGDTWTGVETIIRVLQQLLFIHFRIGCHSRIGIVRQRRARNGASRS

SEQ ID NO: 1515 - protein, 96 aa, Artificial
  HIV Vpr
MEQAPEDQGPQREPYNEWTLEILEELKQEAVRHFPRPWLHNLGQYIYATYGDTWMGVEALLRILQQLLFIHFRIGCQHSRIGILRQRRARNGASRS

SEQ ID NO: 1516 - protein, 96 aa, Artificial
  HIV Vpr
MEQPPEDQGPQREPYNEWALEILEELKQEAVRHFPRPWLHNLGQYIYETYGDTWAGVEAIIRVLQQLLFIHFRIGCHHSRIGIMQQRRARNGASRS

SEQ ID NO: 1517 - protein, 96 aa, Artificial
  HIV Vpr
MEQPPEDQGPQREPYNEWTLEVLEDLKQEAVRHFPRPWLHSIGQYVYSTYGDTWTGVEALMRILQQLLFIHFRIGCRHSRIGILRQRGARNGASRS

SEQ ID NO: 1518 - protein, 96 aa, Artificial
  HIV Vpr
MEQAPENQGPQREPYNEWALELLEELKQEAVRHFPRPWLHDLGQHIYNTYGDTWTGVEAIIRILQQLLFIHFRIGCHHSRIGIIRQRRTRNGASRP

SEQ ID NO: 1519 - protein, 96 aa, Artificial
  HIV Vpr
MEQAPEDQGPQREPYNEWTLELLEELKQEAVRHFPRPWLHSLGLYIYETYGDTWTGVEVIIRILQQLLFIHFRIGCQHSRIGILRQRRARNGPSRS

SEQ ID NO: 1520 - protein, 86 aa, Artificial
  HIV Vpu
MIELIAAVDYRIGVAALIIALIIAIVVWTIAYIEYRKLLKQKKIDRLIKRIIERAEDSGNESDGDHEELSTMVDMGHLRLLDANGL

SEQ ID NO: 1521 - protein, 86 aa, Artificial
  HIV Vpu
MLELTARVDYRLGVGALIVAIILAIVVWIWAYIEYKELLRQRKIDWLIKRIRERAEDSGNESEGDTEELSTMVDMGQLRLLDGNDL

SEQ ID NO: 1522 - protein, 85 aa, Artificial
  HIV Vpu
MLGLSEKAGYALGVGALIVALIIVIVVWTIVYIEYRKLVRQRKIDLIKRIRERAEDSGNESDGDTEELSTMVDMGNLRLLDVNDL

SEQ ID NO: 1523 - protein, 84 aa, Artificial
  HIV Vpu
  misc_feature (10)..(10): Xaa can be any naturally occurring amino acid
MINLLERVDXGVGALGIALIIVIVVWTIVYIEYRKLVRQKKIDQLVKRIREREEDSGNESDGDIEELSTMVDMGHLRLLDVNDL

SEQ ID NO: 1524 - protein, 80 aa, Artificial
  HIV Vpu
MLDLDYKVAVGAFTVALILAIVVWILVYREYRKLLRQKRIDNLIKRIRERAEDSGNESDGDTEELSTLVDMGNLRLLDDL

SEQ ID NO: 1525 - protein, 90 aa, Artificial
  HIV Vpu
MEDVILSFIAKIDYRIGIAAIIVALILAIIVWTIVYLEYRKLVRQRKIDRLIERIKEREEDSGNESEGDTEELATMVDMGQLRLLDVNVL

SEQ ID NO: 1526 - protein, 86 aa, Artificial
  HIV Vpu
MIDLSARVDYRIGVAAFIIALIIAIVVWTIVYIEYRKLLRQRKINWLIERIRERAEDSGNESEGDTEELATMVDMGHLRLLHDNNL

SEQ ID NO: 1527 - protein, 93 aa, Artificial
  HIV Vpu
MLKLATIVDYILAAKVDYRVGIGALIAALIITIVVWIIVYREYRKLLRQKKIDRVLEKIRERAEDSGNESEGDLEELSTLVDVEHLRLVDINH

SEQ ID NO: 1528 - protein, 90 aa, Artificial
  HIV Vpu
IVDVIFSLTDRVDYRIAVAALTIALIIAIVVWTIVYIEYRKLVRQRKIDRLIERIRERAEDSGNESDGDQEELSTMVDMGHLRLLDAHDL

SEQ ID NO: 1529 - protein, 87 aa, Artificial
  HIV Vpu
  misc_feature (7)..(7): Xaa can be any naturally occurring amino acid
MVDWTKXKVDYRIAVVAFIVALIIAIVVWTIVYIEYRKLRKQRKINWLIERIRERAEDSGNESDGDQEELATMVDMGHLRLLDANNL

SEQ ID NO: 1530 - protein, 74 aa, Artificial
  HIV Vpu
MLAIDYSLGVGALLVALFIAIIDRKLVRQAKIDKIIKRIRERAEDSGNESEGDIEELSTMVDMGHLRLMDIINY

SEQ ID NO: 1531 - protein, 86 aa, Artificial
  HIV Vpu
MLELTARVDYRLGVGALIVALIIAIIVWTIASLEYRKLKRQRKIDWLIKRIRERAEDSGNESEGDTEELATMVDMGHLRLLDINDL

SEQ ID NO: 1532 - protein, 86 aa, Artificial
  HIV Vpu
MLSLMTRVDYRIAVAAFVIALILAIIVWTIAYLEYRKLVKQKKIDWLIERIRERAEDSGNESDGDHEELSTMVDMGHLRLLDANDL

SEQ ID NO: 1533 - protein, 85 aa, Artificial
  HIV Vpu
MLDLAAIVDYRITIVAFAIALFIAIIVWTIAYLEYRKLVRQRKIDRLIKRIRERAEDSGNESEGDTEELATMVDMGQLRLLGHGL

SEQ ID NO: 1534 - protein, 86 aa, Artificial
  HIV Vpu
MLDLIAKVDYRVGIGALIVALIIAVVVWIIAYIEYRKLLKQRKIDWLIKRIRERAEDSGNESEGDIEELATMVDMGHLRLLDVHDL

SEQ ID NO: 1535 - protein, 87 aa, Artificial
  HIV Vpu
  misc_feature (16)..(16): Xaa can be any naturally occurring amino acid
MIDWTEQVDYRIAIVXSFIVALIIAIVIWTLAYIEYRKLSRQRKIDWLIKRIRERAEDSGNESDGDHEELATMVDLGHLRLLDANDL

SEQ ID NO: 1536 - protein, 86 aa, Artificial
  HIV Vpu
MLSLIERIDYRLGVGALIVALIIVIIVWTIVYIEYRKLVRQRKLDWLVKRIRERAEDSGNESDGDVEELSTMVDMGHLRLLDVNDL

SEQ ID NO: 1537 - protein, 84 aa, Artificial
  HIV Vpu
MLDLAARVDYRLGVGALVVALIIAIIVWTIVYIEYRKLVRQRKIDWLIKRIGERAEDSGNESEGDTEELATMVDMGHLRLLDDL

SEQ ID NO: 1538 - protein, 85 aa, Artificial
  HIV Vpu
MVDLGRVDYRLGVGALIVALIIAIVVWIIVYIEYRKLVRQRKIDWLVKRIRERAEDSGNESEGDTEELATMVDMGHIRLLDGNDL

SEQ ID NO: 1539 - protein, 86 aa, Artificial
  HIV Vpu
MLDLLTRVDYRLGVGALIVALIIAIIVWTIAYIEYRKLLRQRKIDWLIKRIREREEDSGNESEGDTEELAAMVDMGHLELLGAHDL

SEQ ID NO: 1540 - protein, 83 aa, Artificial
  HIV Vpu
MFDLLAGVDYRLGVGALIIALIIAIVVWVIAYIEYKKWLKQKKIDWLIERIRERAEDNGNESEGDTEELATMVDMGHLRLLDL

SEQ ID NO: 1541 - protein, 86 aa, Artificial
  HIV Vpu
MVDLLEKVDYRIGIAAFTVALLIAIIVWIIAYIEYRKLVRQRKIDWLIKRIRERAEDSGNESEGDTEELATMVDMGQLRLLDVNDI

SEQ ID NO: 1542 - protein, 85 aa, Artificial
  HIV Vpu
MLDLTQIGYELGIGALIVALIIAIVVWTIVYIEYRKVLRQRKIDRLIKRIRERAEDSGNESEGDIEELEAIVDMGHLRLLGINNL

SEQ ID NO: 1543 - protein, 83 aa, Artificial
  HIV Vpu
MLAAVDYRLGVGALTVALILVIIVWTIVYIEYRKLVRQRKIDWLIKRIRERAEDSGNESEGDIEDLAMVVDMGQLRLLDVNNL

SEQ ID NO: 1544 - protein, 86 aa, Artificial
  HIV Vpu
MLDLLAGVDYRIGVGAFLVALSIAIVVWTIVYIEYRKLLRQKRIDRLIERIRERAEDSGNESEGDIEELSTMVDMGHLRLLDVNDV

SEQ ID NO: 1545 - protein, 86 aa, Artificial
  HIV Vpu
MFSLLERIDYRLGVGALLVALIIAIVVWAIVYIEYRKLVRQRRLDWLVKRIRERAEDSGNESEGDNEELSTVVDLGHLRLLDVTDL

SEQ ID NO: 1546 - protein, 85 aa, Artificial
  HIV Vpu
MFALFEVDYRLTIGAFIVALFLAIVVWTIAYLEYRKLVRQRRIDQLVKRIRERAEDSGNESDGDTEELSTMVDMGHLRLLDVNDL

SEQ ID NO: 1547 - protein, 86 aa, Artificial
  HIV Vpu
MLELIAKIDYRLGGGALIVALSIAIVVWIIAYIEYKKLIRQRRINWLIERIRERAEDSGNESEGDTEELSTMVDMGHLRLLDDNAL

SEQ ID NO: 1548 - protein, 83 aa, Artificial
  HIV Vpu
MLSLAAIDYRIGVGAFVVALIIAIIVWIIVYIEYRKLVRQRKIDWLVKRIRERAEDSGNESDGDTEELSTMVDMGHLRLLDDI

SEQ ID NO: 1549 - protein, 85 aa, Artificial
  HIV Vpu
MINFLAKVDYRLGVGALIVAFIIAIVVWIIAYIEYRKLLRQRKIDRLIRKIRERAEDSGNESDGDIEELSAMVDVGHLRLLDVNN

SEQ ID NO: 1550 - protein, 84 aa, Artificial
  HIV Vpu
MIDLLARVDYRIGLAAFVVALLIAIIVWTIVYLEYRKLVRQRKIDWLIKRIRERAEDSGNESEGDTEELATMVDMGQLRLLDNL

SEQ ID NO: 1551 - protein, 86 aa, Artificial
  HIV Vpu
MVDLLAKVDYKIAVAAFIIALIIAIVVWIIVYVEYRKLVKQRKIDWLIERIRERAEDSGNESDGDHEELSTMVDMGHLRLLDANDL

SEQ ID NO: 1552 - protein, 86 aa, Artificial
  HIV Vpu
MLYLLEKVDYRLGVGALIIALIIAIIVWTIAYLEYRKVLRQRRIDRLVERIREREEDSGNESEGDIEELSTMVDMGHLRLLDADGL

SEQ ID NO: 1553 - protein, 84 aa, Artificial
  HIV Vpu
MVNFLAAKVDYRLGVGALIVALIIAIVVWSIVYIEYKKLLKQKNIDWLIKRIRERAEDSGNESEGDTEELATMVDMGHLRLLDL

SEQ ID NO: 1554 - protein, 85 aa, Artificial
  HIV Vpu
MFSLLAKVDYRVGVGALIVALIIAIIVWIIVYIEYRKLLRQKKIDRLIERIRERAEDSGNDSEGDIEDLSTMVDMDHLRLLDINN

SEQ ID NO: 1555 - protein, 86 aa, Artificial
  HIV Vpu
MLNLLAKVDYRLGVGALVIALIIAIVVWIIAYIEYRKLVRQRKLDELVKRIRERAEDSGNESDGDIEELSTMVDMGHLRLLDVNDL

SEQ ID NO: 1556 - protein, 86 aa, Artificial
  HIV Vpu
MIDWTARVDYRVAVVAFIVALILAIIVWIIAYLEYRKLSKQRKIDCLIKRIRERAEDSGNESDGDQEELATMVDMGRLRLLDTNDL

SEQ ID NO: 1557 - protein, 85 aa, Artificial
  HIV Vpu
MLSLAALVDYRLGVGALIVALIIAIIVWTIVYLEYRKLVRQRKINWLVKRIRERAEDSGNESEGDTEELATMVDLEHFGLLDINL

SEQ ID NO: 1558 - protein, 86 aa, Artificial
  HIV Vpu
MVVLGEKEIYILGIGALIVALIIAIVVWSIAYIEYRKLVRQRRIDQLIKRIGERAEDSGNESDGDTEELSTLVDMGHLRLLDDNEL

SEQ ID NO: 1559 - protein, 86 aa, Artificial
  HIV Vpu
MSNWTARVDYRIAIAAFIVALIIAIVVWTIVYIEYRKLSRQRKIDRLIKRIRERAEDSGNESDGDQDELATMVDMGHLRLLDVNDL

SEQ ID NO: 1560 - protein, 84 aa, Artificial
  HIV Vpu
MLDLTEGVDYRIGIAAFAVALFIAIIVWIIVYLEYRKIVKQRKIDWLIERIRERAEDSGNESEGDTEELATMVDMGQLRLLDVM

SEQ ID NO: 1561 - protein, 86 aa, Artificial
  HIV Vpu
MLELLEKVDYKITVAAFIVALIIAIVVWTIAYIEYRKLLRQRKIDCLIKRIRERAEDSGNESDGDTEELSTMVDMGNLRLLDANDL

SEQ ID NO: 1562 - protein, 86 aa, Artificial
  HIV Vpu
MLDLIARVDYRLGVGALIVALIIAIIVWTIVYIEYRKLVKQRKIDWLIKRIRERVEDSGNESDGDTEELSTLVDMGNLRLLDANDL

SEQ ID NO: 1563 - protein, 86 aa, Artificial
  HIV Vpu
MLAFLARVDYRLGVGAFIIALIIAIIVWTIAYLEYRKLVRQKKIDRLIERIRERAEDSGNESEGDTEELSTMVDMGHLRLLDAHDL

SEQ ID NO: 1564 - protein, 86 aa, Artificial
  HIV Vpu
MLNLVARVDYRLGVGALIVALIIAIVVWTLVYIEYRKLVRQRKIDQLVKRIRERAEDSGNESEGDIEELSTMVDMGNLRLLDANDL

SEQ ID NO: 1565 - protein, 78 aa, Artificial
  HIV Vpu
MLENIDYRLGVGALIVALIIVIIVWTIVYIEYRKLVRQRKIDWLIKRIRERAEDSGNESEGDTEELATMVDMEHLRLL

SEQ ID NO: 1566 - protein, 86 aa, Artificial
  HIV Vpu
MLDLTARVDYRLGVGALIVALIIAIVVWTIVYLEYRKLQRQRRIDWLIKRIRERAEDSGNESEGDTEELATMVDMGHLRLLDVNDL

SEQ ID NO: 1567 - protein, 84 aa, Artificial
  HIV Vpu
MINLIARVDYRLGVGALIIALIIAIVVWTIAYIEYRKLLKQKKIDWLIKRIRERAEDSGNESEGDTEGLSTMVDMEHLRLLDDL

SEQ ID NO: 1568 - protein, 82 aa, Artificial
  HIV Vpu
MLELDYRIGIAAFIIALIIAIVVWTIVYIEYRKLRRQRKIDRLIERIRERAEDSGNESDGDQEELSAMVDMGHLRLLDVNDL

SEQ ID NO: 1569 - protein, 86 aa, Artificial
  HIV Vpu
MFNLAARVDYRLGVGALVIAGIIAIVVWTIVYIEYRKLSRQRKINEIIKRIRERAEDSGNESDGDMEELSTMVDLGHLGLLDANDL

SEQ ID NO: 1570 - protein, 81 aa, Artificial
  HIV Vpu
MSPLAILSIVGLVVASILAIVVWTVVFIEYRKIKKQRKIDWLLERISERAEDSGNESDGDTEELSKMVGMGNLGFWDDNDV

SEQ ID NO: 1571 - protein, 81 aa, Artificial
  HIV Vpu
MLPLVILAIVGLIVALILAIVVWTIVFIEYKKIKKQRKIDWLIKRISERAEDSGNESDGDTEELSALVERGHLDFGDVNNV

SEQ ID NO: 1572 - protein, 80 aa, Artificial
  HIV Vpu
MNSLQILSIVGLIVAFILAVVVWTIVFIEYKKIKKQNKIDWLIKRISERAEDSGNESEGDTEELSTLMEMGNLDFGDAND

SEQ ID NO: 1573 - protein, 81 aa, Artificial
  HIV Vpu
MQALEISAIVGLIVAFIAATVVWTIVYIEYRKIRKQKRIERLLDRIGERAEDSGNESEGDAEELAKLVEMGGFDPWVGDNL

SEQ ID NO: 1574 - protein, 81 aa, Artificial
  HIV Vpu
  misc_feature (5)..(5): Xaa can be any naturally occurring amino acid
  misc_feature (19)..(20): Xaa can be any naturally occurring amino acid
  misc_feature (29)..(29): Xaa can be any naturally occurring amino acid
  misc_feature (31)..(32): Xaa can be any naturally occurring amino acid
  misc_feature (43)..(43): Xaa can be any naturally occurring amino acid
  misc_feature (46)..(48): Xaa can be any naturally occurring amino acid
  misc_feature (62)..(62): Xaa can be any naturally occurring amino acid
  misc_feature (71)..(71): Xaa can be any naturally occurring amino acid
MTPLXIYAIVALVVVFVIXXVVWTIVGIXYXXLLKQRKIDRLXERXXXRAEDSGNESEGDAXELSTLMEVXNYALLDDNNV

SEQ ID NO: 1575 - protein, 81 aa, Artificial
  HIV Vpu
MSPLEISAIVGLIVALILAIAVWTIVGIEYKKIRKQRKIDRLIERIRERAEDSGNESDGDTEELSTLIDMGDYDLGDNNIL

SEQ ID NO: 1576 - protein, 80 aa, Artificial
  HIV Vpu
MQSLVILAIVALVVVLIIAIVVWTIVFIEWGRLRRQRKDRLIERIRERAEDSGNESDGDTEELSALIEMGNYNLGFDNNL

SEQ ID NO: 1577 - protein, 82 aa, Artificial
  HIV Vpu
MLPLSTIWAIIGLIVALILAIVVWTIVGIEYKKLLKQRKIDKLVERIRERAEDSGNESDGDTNELAALIEMGNYNLGDDNDL

SEQ ID NO: 1578 - protein, 81 aa, Artificial
  HIV Vpu
MIPLQIWAIAGLIVALILAIIAWTIVGIEYEKLLKQKEIDGLVERIAERAEDSGNESDGDTEELSTLIEMGNYDLGVGNNL

SEQ ID NO: 1579 - protein, 86 aa, Artificial
  HIV Vpu
MSALEISALEIWSIVGLVVALILAIVVWTIVGIECKRLQKQRKIDRLIERIRERAEDSGNESEGDTEELSALIEMGNYDLGNDNNL

SEQ ID NO: 1580 - protein, 81 aa, Artificial
  HIV Vpu
MTPLEIWAIVGLVVVSIIAIVVWTIVGIEYKKLLKQRKIDRLIRRISERAEDSGNESDGDTDELAKLVEMGNYDLGDNNNL

SEQ ID NO: 1581 - protein, 81 aa, Artificial
  HIV Vpu
MSPLEIWAIVGLIVALILAIVVWTIVGLEYKKLKRQRKIDRLIERIRERAEDSGNESDGDTEELSTLIELGDYDLGDDNNL

SEQ ID NO: 1582 - protein, 81 aa, Artificial
  HIV Vpu
MQLLEICAVVGLVVALIIAIVVWTIVGIEYKKLLKQRKIDRLVDRIRERAEDSGNESDGDREELSLLVDMGDYDLGDDNNL

SEQ ID NO: 1583 - protein, 80 aa, Artificial
  HIV Vpu
MTPLEIWAITGLIVALILAIVVWTIVGIEKKLLKQKKIDRLLNRIRERAEDSGNESDGDTEELSLLVEMGNYDLGVDNNL

SEQ ID NO: 1584 - protein, 82 aa, Artificial
  HIV Vpu
MLNLNYELAVGALIVALIIAIVVWTIVYVEYRKLLRQRKIDRLIKRIRERAEDSGNESEGDTEELSTMVDMGQLRLLDVNGL

SEQ ID NO: 1585 - protein, 81 aa, Artificial
  HIV Vpu
MTSLEIYAIVALIVALIIVIVVWTLAGIEYKKLLKQRKIDRLIKKIRERAEDSGNESDGDIDELSKLVGVGNYDLGDVNNL

SEQ ID NO: 1586 - protein, 86 aa, Artificial
  HIV Vpu
MLDLLAEIDYRIGVGAFIIALIIAVVVWIIAYIEYRKLVKQRKIDWLIKRIRERAEDSGNESDGDTEELSTMVDMGHLRLLDVNNL

SEQ ID NO: 1587 - protein, 81 aa, Artificial
  HIV Vpu
MQPLEICSIVGLIVAIILAIVAWTIVGIEIKKLLRQKKIDRLIERIRERAEDSGNESDGDTEELAALVEMGNYDPGDDINL

SEQ ID NO: 1588 - protein, 86 aa, Artificial
  HIV Vpu
MLELLAQVDYRIGVGALILALFIAIVVWIIAYLEYRKLVRQRKIDWLVKRIRERAEDSGNESEGDTEELSTMVDMGELRLMDAIDL

SEQ ID NO: 1589 - protein, 81 aa, Artificial
  HIV Vpu
MQSLVILSIVALVVALVIAIVVWTIVFIEYRRLERQKRIDWLIDRIRERAEDSGNESEGDRDELSELVEMGHPAPWDVDDM

SEQ ID NO: 1590 - protein, 82 aa, Artificial
  HIV Vpu
MLSLLHICAIVGLLVALIIAIVVWTIVGIEYKRLLRQRKIDRILDRIRVRAEDSGNESDGDTEELSKLIDMGNYDLGDDNNL

SEQ ID NO: 1591 - protein, 80 aa, Artificial
  HIV Vpu
MYILGIGIGALIVAFIIVIVVWTIVYLEYRKLVKQKRIDQLIERIRERAEDSGNESDGDTEELSELVEMGRLNLGYVADL

SEQ ID NO: 1592 - protein, 81 aa, Artificial
  HIV Vpu
IQPLVILAIVALVVTLIIAIVVWTIVFIEIRKIRRQRKIDRLIDRIRERAEDSGNESEGDTEELSKLVEMGHDAPWDVDDL

SEQ ID NO: 1593 - protein, 81 aa, Artificial
  HIV Vpu
MQSLEIAAVVGLIVAFIAAIIVWTIVFIEYRKIRKQKKIEKLPDRIRERAEDSGNESEGDTDELATLVERGNFDPWVGDNL

SEQ ID NO: 1594 - protein, 75 aa, Artificial
  HIV Vpu
MQSLEIAAIAGLVVAAIAAIVVWTIKIKKQEKIDRLLDRIRERAEDSGNESEGDTEELATLVDMVDFDPWVGDNL

SEQ ID NO: 1595 - protein, 80 aa, Artificial
  HIV Vpu
MYILGIGIGALVVAFIIAIVVWTIAYIEYRKLLRQRKIDWLIRRISERAEDSGNESDGDTEELSTLVEMGNHNPGYVNDL

SEQ ID NO: 1596 - protein, 77 aa, Artificial
  HIV Vpu
MQFLEIASIVGLIVAVLAAIVVWIEYRKIRKEKKIEYLIDRIRKRAEDSGNESEGDTEELSTLMEMGDFHPWVGDNL

SEQ ID NO: 1597 - protein, 81 aa, Artificial
  HIV Vpu
MRPLQIAAIVGVIVAIFLAIVVWTIVYIEYKRLVRQKKIDRIIDRIGERAEDSGNESDGDTDELHKLVEMGPHDLWNVNDL

SEQ ID NO: 1598 - protein, 81 aa, Artificial
  HIV Vpu
MQSLQIVAIVALVVVTIIAIVVWTIVFIEYRRILRQRKIDRLIDRIAERAEDSGNESEGDQEELAALVEMGHHAPWDVDDL

SEQ ID NO: 1599 - protein, 81 aa, Artificial
  HIV Vpu
MQALTILAIVALVVVAIIAIVVWTIVLLEYRKILRQRKIDRLIDRIRERAEDSGNESDGDQEELSAFMEMGHHAPWDVDDL

SEQ ID NO: 1600 - protein, 81 aa, Artificial
  HIV Vpu
MQSLQVAAIVALVVVAIIAIVVWTIVFIEYRKILRQRKIDRLIDRIIERAEDSGNESEGDQEELSALVEMGHHAPWDVDDL

SEQ ID NO: 1601 - protein, 81 aa, Artificial
  HIV Vpu
MLSLQIAAIVALVVAAIIVIVVWTIVVIEYRKLLRQRKINRLIDRLTERAEDSGNESEGDQEELSALVERGHLAPWDVNDQ

SEQ ID NO: 1602 - protein, 82 aa, Artificial
  HIV Vpu
TQPIPIVAIVALVVAIIIAIVVWSIVIIEYRKILRQRKIDRLIDRLIERAEDSGNESEGEISALVEMGVEMGHHAPWDVDDL

SEQ ID NO: 1603 - protein, 81 aa, Artificial
  HIV Vpu
IYSLQILAIVALVVVTIIAIVVWTIVLLEYRKILRQRKIDRLIDRIRERAEDSGNDSEGDQEELSALVEMGHHAPWDVDDM

SEQ ID NO: 1604 - protein, 80 aa, Artificial
  HIV Vpu
MLPLQIAIVALVVVAIIAIVVWTIVFIEYRKIRRQKQVDRLIDRIIERAEDSGNESEGDQEELSALMEMGHNAPWDVNDL

SEQ ID NO: 1605 - protein, 78 aa, Artificial
  HIV Vpu
IQILTIVALVVAGIVAIVVWIIVFIEYRKILKKKKIDRLIDRIIERAEDSDNESEGDQEELSALVEMGHHAPWDVDDL

SEQ ID NO: 1606 - protein, 81 aa, Artificial
  HIV Vpu
IVSLQIVAIVALVVVTIIAIVVWTIVFIEYRKILRQRKIDRLIDRIRERAEDSGNESEGDQEELSELVEMGHLVPWDVDDL

SEQ ID NO: 1607 - protein, 81 aa, Artificial
  HIV Vpu
MQLLAILAIVGLVVAAILAIVVWFIVFIEYKKILKQKKIDRLIDRIRERAEDSGNESEGDQEELSALVEMGHHAPWDVDDL

SEQ ID NO: 1608 - protein, 81 aa, Artificial
  HIV Vpu
MQPLVVAAIVALVVVAIIAIVVWSIVFIEYRKILRQRKIDRLIDRIAERAEDSGNESEGDQEELSALVEMGHHAPWDVDDL

SEQ ID NO: 1609 - protein, 81 aa, Artificial
  HIV Vpu
MQPLHILAIVALVVAAIIAIVVWTIVLLEYRKILRQRKIDRLIDRIRERAEDSGNESEGDQDELSALVEMGYHAPWDVNDQ

SEQ ID NO: 1610 - protein, 73 aa, Artificial
  HIV Vpu
MQPIQIAAIVALVVVGIIAIVVWKILRQRKIDRLIKRISKRAEDSGNESEGDQEELSALVEMGHHALWDIDDL

SEQ ID NO: 1611 - protein, 81 aa, Artificial
  HIV Vpu
MQPLVILAIVALVVALIIVIVVWSIVLIEYRKILRQKKIDRLIDRIRERAEDSGNESDGDQEELSALVERGHLAPWDIDDL

SEQ ID NO: 1612 - protein, 81 aa, Artificial
  HIV Vpu
MQPLQILAIVALVVAGIIAIIVWSIVLIEYRKILRQRKIDRLIDKIRERAEDSGNESEGDQEELSALVERGHLAPWDINDL

SEQ ID NO: 1613 - protein, 80 aa, Artificial
  HIV Vpu
MQPLVIAAIVALVVAGIIAIVVSIVFIEYRKIRRQRKIDRLIDRISERAEDSGNESEGDQEELSALVGMGHDAPWVINDL

SEQ ID NO: 1614 - protein, 80 aa, Artificial
  HIV Vpu
MLSLQILAIVALVVAAIIAIVVWSIVFIEYRKILRQRKIDRLIDRIREREEDSGNESEGDQEELAALERGHLAPWDVDDL

SEQ ID NO: 1615 - protein, 81 aa, Artificial
  HIV Vpu
MQSLEILAIVALVVAAILAIVVWTIVGIEIRKTLRQKKIDRLIDRIRERAEDSGNESDGDEEELSALVEMGHHAPWDVDDL

SEQ ID NO: 1616 - protein, 80 aa, Artificial
  HIV Vpu
MQSLQILAIVSLVVVAIIAIVVWTIVLIEYRKILRQRIDRLIDRIREKAEDSGNESEGDQEELSALVEMGHLAPWDVDDL

SEQ ID NO: 1617 - protein, 81 aa, Artificial
  HIV Vpu
MQSLQILAIVALVVAGIIAIVVWSIVLIEYRKILRQRKIDRLIDRIRDRAEDSGNESEGDQEELSALVEMGHHAPWDIDDL

SEQ ID NO: 1618 - protein, 80 aa, Artificial
  HIV Vpu
MPLYILAVVALVLAAIIAIVVWTIVFIEYRKILRQRKIDRLIDRIRERAEDSGNESEGDQEELSALMEMGHHAPWDVDDL

SEQ ID NO: 1619 - protein, 81 aa, Artificial
  HIV Vpu
LQSLQVLAIVALVVATIIAIVVWTIVFIEYRKILRQRKIDRLINRITERAEDSGNESDGDQEELSALVERGHLAPWDVDDL

SEQ ID NO: 1620 - protein, 81 aa, Artificial
  HIV Vpu
MSYLLVIGLAALIAALIIAIVVWTIAYIEYRELVRQRKINRLYKRIRERAEDSGNESEGDAEELAALGEMGPFIPGDIDNL

SEQ ID NO: 1621 - protein, 86 aa, Artificial
  HIV Vpu
MLELIGRIDYRLGVGALIVALIIVIIVWTIAYIEYRKLVRQRRIDWLVKRIKERAEDSGNESGGDTEELETMVDMGHLRLLDGNDL

SEQ ID NO: 1622 - protein, 84 aa, Artificial
  HIV Vpu
MISLAARVDYRIGVGAFIVALIIAIIVWTIVYIEYRKLVRQRKIDWLVKRIRERAEDSGNESDGDTEELSTMVDMGHLRLLDDN

SEQ ID NO: 1623 - protein, 86 aa, Artificial; identical to SEQ ID NO: 1551
  HIV Vpu

SEQ ID NO: 1624 - protein, 86 aa, Artificial; identical to SEQ ID NO: 1552
  HIV Vpu

SEQ ID NO: 1625 - protein, 84 aa, Artificial; identical to SEQ ID NO: 1553
  HIV Vpu

SEQ ID NO: 1626 - protein, 86 aa, Artificial
  HIV Vpu
MVDLLAKVDYRIVIVAFIVALIIAIVVWTIAYIEYRKLLRQRRIDRLIKRTRERAEDSGNESDGDTEELSTMVDMGNLRLLDVNDL

SEQ ID NO: 1627 - protein, 81 aa, Artificial
  HIV Vpu
MIDLYRLGVGALIVALIIAIVVWTIVYIEYRKLVRQSKINWLIKRIRERAEDSGNESEGDTEELSTMVDMGRLRLLDVNDL

SEQ ID NO: 1628 - protein, 82 aa, Artificial
  HIV Vpu
MLDLDYKLAVGALIVALIIAIVVWIIAYIEYRKLVKQRKIDWLIKRIRERAEDSGNESEGDTEELSTMVDMGRLRLLDVNDL

SEQ ID NO: 1629 - protein, 82 aa, Artificial
  HIV Vpu
IIDLDYRLGVGALIVAFIIAIVVWTIVYIKYRKLLRQRRIDWLIKRIRERAEDSGNESEGDTEELSTMVDMGHLRLLDVNDM

SEQ ID NO: 1630 - protein, 80 aa, Artificial
  HIV Vpu
MLDLKLAVGALIVALIIAIVVWTIVYIEYRRLVKQRKIDWLIKRIRERAEDSGNESEGDTEELSTMVDMGRLRLLDVNDL

SEQ ID NO: 1631 - protein, 82 aa, Artificial
  HIV Vpu
MVNLDYKLGVGALIVALIIAIVVWTIVYIEYRKLVQQRKIDWLIKRIRERAEDSGNESEGDTEELSTMVDMGRLRLLDVNDL

SEQ ID NO: 1632 - protein, 80 aa, Artificial
  HIV Vpu
MSALQIAIVGLIVALILAIVVWTIVFIEYKKILRQRKIDRLIERIRERAEDSGNGSEGDTNELATLVEVGDFDPWVGDNL

SEQ ID NO: 1633 - protein, 81 aa, Artificial
  HIV Vpu
RLPLHICAIVGLIVALIIAIVVWTIVAIEYKKLRRQRKIDRLVQRISERAEDSGNESEGDTEELAKLVEMGDFDPWVGDNL

SEQ ID NO: 1634 - protein, 80 aa, Artificial
  HIV Vpu
MLPLQISAIVRLIVALILAIVVWTLVAIEYRILRQRKIDRLIERIRERAEDSGNESEGDTDELAKLVEMGDFDPWVGDNV

SEQ ID NO: 1635 - protein, 81 aa, Artificial
  HIV Vpu
MSPLEISAIVGLIVAIILVIVVWTIVAIEFKKILGQRKIDRLVKRIRERAEDSGNESEGDTDELAKLVEMGDFDPWVGDNL

SEQ ID NO: 1636 - protein, 81 aa, Artificial
  HIV Vpu
MSPLEISAIVGLIVALILAIVVWTIVAIEFKKILRQRKIDRLVKRIRERAEDSGNESEGDTDELAKLVEMGDFDPWVGDNL

SEQ ID NO: 1637 - protein, 80 aa, Artificial
  HIV Vpu
MHLWKLAIVGLLVALILAIVVWTIVAIEFKKILRQRKIDRLVKRIREREEDSGNESEGDTDKLAKLVEMGDFDPWVGDNV

SEQ ID NO: 1638 - protein, 80 aa, Artificial
  HIV Vpu
MTPLEISAVVGLIVVLILAIVVWTIVGILKKILRQRKIDRLVKRIRERAEDSGNESEGDTDELAQLVEMEDFDPWVGDNL

SEQ ID NO: 1639 - protein, 80 aa, Artificial
  HIV Vpu
MTPLEISAIVGLIVALILAIVVTIVAIEVKKILRQRKIDRLVKRIRERAEDSGNESEGDTDELAKLVEMGDFDPWVGDNL

SEQ ID NO: 1640 - protein, 80 aa, Artificial
  HIV Vpu
MTPLQISAIVGLIVALILAIVVTIVIIEYKKILKQRKIDRLIKRIGERAEDSGNESEGDTDELAKLVEMGDFDPWVGDNL

SEQ ID NO: 1641 - protein, 81 aa, Artificial
  HIV Vpu
MQSLEITAIVGLVVAFIAAIVVWAIVFIEYRKIRKQKKIDKLLDRIRERAEDSGNESDGDAEELSTLMEMGYDHILDNDNL

SEQ ID NO: 1642 - protein, 81 aa, Artificial
  HIV Vpu
MKSLEIAAIVGLVVAIIAGIVVWTIVVIEYRKIRKQKKIDKLLDRIRERAEDSGNESDGDTEELSTLLEMGYDNILDNDNL

SEQ ID NO: 1643 - protein, 79 aa, Artificial
  HIV Vpu
MQSLEIAAIVGLVVAFIAAIVVWIIVYIEYRKIRKQKKIDKLLDRIREREEDSGNESEGDAEELSKLMEMGHDFWIDNL

SEQ ID NO: 1644 - protein, 81 aa, Artificial
  HIV Vpu
MQPLTITAIVGLVVAFIAAIVVWSIVYIEYRKIRKQKKIDRLLDRIRERAEDSGNESDGDTEELSTLMEMGYEYILDNDNL

SEQ ID NO: 1645 - protein, 81 aa, Artificial
  HIV Vpu
MNSLDIVAIVGLVVAFIAAIVVWTIVYIEYRKIRKQKKIDRLLDRIRERAEDSGNESDGDTEELSTLMEMGYDNILDNDNL

SEQ ID NO: 1646 - protein, 82 aa, Artificial
  HIV Vpu
MQPLAVAAIVGLVVAFILAIVVWTIVFIEYRKIRKQGKIDKLLDRIRERAEDSGNESDGDTEELSTLLEMGYDNAALDIDNL

SEQ ID NO: 1647 - protein, 78 aa, Artificial
  HIV Vpu
MQSLAIAAIVALVVVGIIAIVVGSIVFIEYRKILRQRKIDRLIDRIRERAEDSGNESEGDQEALMEMGHLVPWDADDL

SEQ ID NO: 1648 - protein, 78 aa, Artificial
  HIV Vpu
MQFLVIAAIVALVVGGIIAIVVWSIVFIEYRKILRQRKIDRLIDRIRERAEDSGNESEGDQEALMEMGHLAPWDADDL

SEQ ID NO: 1649 - protein, 81 aa, Artificial
  HIV Vpu
MLFWEIWAIVGLVVALIIVIVVWTLVFIEYKKLRRQRRIDSLYNRIRERAEDSGNESDGDAEELSTLVGMGNFDPWVGDNL

SEQ ID NO: 1650 - protein, 84 aa, Artificial
  HIV Vpu
MSSLSSLEIWTIVALIVALIIAIVVWTIVYIEYKKLQRQRKIDRLYKRIRERAEDSGNESDGDTEELSTLVGMGDFDPWVGNNV

SEQ ID NO: 1651 - protein, 84 aa, Artificial
  HIV Vpu
MSSMSSLQVWAITALIVALIIAIIVWTIALIEYRKLLRQRKIDRLCKRIIERAEDSGNDSDGDTEELSTLVDMGDFHPLVGNNL

SEQ ID NO: 1652 - protein, 81 aa, Artificial
  HIV Vpu
MSDLLTIAVVALIVALIIAIVVWIIVYIEYKKLVRQRKINRLYKRIRERAEDSGNESEGDAEELAALGEVGPFIPGDINNL

SEQ ID NO: 1653 - protein, 81 aa, Artificial
  HIV Vpu
MSDLLAVAIAAFIVALIIAIVVWTIVYLEYRKLVRQRKINRLYKRIRERAEDSGNESEGDAEELAALGEMGPFIPGNINNL

SEQ ID NO: 1654 - protein, 81 aa, Artificial
  HIV Vpu
MQALEIAAIVGLVVAFLAAIVVWTIVFIQYREIRKQKKIEKLLDRIRERAEDSGNESEGDTDELATLMEMGDFDPWVGDNL

SEQ ID NO: 1655 - protein, 81 aa, Artificial
  HIV Vpu
MQSLEISAIVGLVVAFLAAIVVWTIVFIQYREIRKQRKIEKLLNRIRERAEDSGNESEGDTEELAAFMEMGNFDPWVGDNL

SEQ ID NO: 1656 - protein, 81 aa, Artificial
  HIV Vpu
MQPLEISAVVGLIVAFLAAIVVWTIVYIQYREIRKQKKIEKLLDRIRERAEDSGNESEGDTDELATLMEMGNFDPWVGDNL

SEQ ID NO: 1657 - protein, 81 aa, Artificial
  HIV Vpu
MQPLEISAIVGLIVAFLAAIVVWTIVFILHRQIKKQKKIEKLLDRIREREEDSGNDSEGDTEELATLMEMGNFDPWVGDNL

SEQ ID NO: 1658 - protein, 81 aa, Artificial
  HIV Vpu
MIPLQIAGIVALIVAAIIVIIVWTIVFIEYRKLLKQKKIDRLIDRIRERAEDSGNESEGDTEELARLVEMGPHDQWNVNDL

SEQ ID NO: 1659 - protein, 77 aa, Artificial
  HIV Vpu
MITLRTVKHSSISQHLLIAIIVWTIAGIEYRRLLRHRKDRLRIRRAEDSGNESEGDTEELAQLVEMGPHDLWNVNDL

SEQ ID NO: 1660 - protein, 82 aa, Artificial
  HIV Vpu
MQSLQILAIVALVLALIIAIVVWTIVFIEYRRIKRQRKIDWLIDRIREREEDSGNESEGDKEELSTLVEMGHHAPWDVDDDL

SEQ ID NO: 1661 - protein, 81 aa, Artificial
  HIV Vpu
MQPLGIIAIAALVVAIILAIVVWTIVFIEYRRIKKQRRIDCLLDRITERAEDSGNESEGDREKLSKLVEMGHHAPWDIDDL

SEQ ID NO: 1662 - protein, 81 aa, Artificial
  HIV Vpu
MQPLVIIAIAALVVAIIIAIVVWTIVYIEYRRIKRQRKIDCLIDRIRERAEDSGNESEGEREELSKLVEMGHHAPWDVDDL

SEQ ID NO: 1663 - protein, 81 aa, Artificial
  HIV Vpu
MQPLEILAIVALVVALILAIVVWTIVFIECKKLRRQRKIDWLIDRIRERAEDSGNESEGDKEELSALVEMGHDAPWDADDM

SEQ ID NO: 1664 - protein, 81 aa, Artificial
  HIV Vpu
MSYLLAIGIAALIVALIIAIVVWTIVYIEYKKLVRQRKINKLYKRIRERAEDSGNESEGDAEELAALGEMGPFIPGDINNL

SEQ ID NO: 1665 - protein, 81 aa, Artificial
  HIV Vpu
MSNLLAIGIAALIVALIITIVVWTIAYIEYKKLVRQRKINRLYKRISERAEDSGNESEGDAEELAALGEVGPFIPGDINNL

SEQ ID NO: 1666 - protein, 81 aa, Artificial
  HIV Vpu
MSDLLAITIVAFIVALIIVIVVWTIVFIEYKKLVRQRKINRLYIRIRERAEDSGNESEGDAEELAALGKMGPFIPGDVNNL

SEQ ID NO: 1667 - protein, 81 aa, Artificial
  HIV Vpu
MSNLYVLSIVAFIIALIIAIVVWTIVFIEYKKLLRQRKINRLYERIRERAEDSGNESEGDAEELAALGEMGSFISGDINNL

SEQ ID NO: 1668 - protein, 81 aa, Artificial
  HIV Vpu
MSLSLIVVIAAYIVVLILAIIVWTIVYIEYKKILRQKRINRLYERIIERAEDSGNESEGDAEELAALGEVGPLIPGDINNL

SEQ ID NO: 1669 - protein, 80 aa, Artificial
  HIV Vpu
MNLLLVGIGALIVAFLLAIVVWTIAYLEYRKVLKQERINQLYNRLIERAEDSGNESEGEAEELAALGEVGHLVLGNIHNL

SEQ ID NO: 1670 - protein, 81 aa, Artificial
  HIV Vpu
MQPLEISAIVGLIVASIAAIVVWTIVFIEYRKIRKQKRIEKLLDRIRERAEDSGNESEGDTEELATLMELGDFDPWVGDNL

SEQ ID NO: 1671 - protein, 77 aa, Artificial
  HIV Vpu
MQALEISLIVAFIAATIVWSIVFIEYRKIRKQKKIEKLLDRIRERAEDSGNESEGDTEELATLMEMGDFDPWVGNNL

SEQ ID NO: 1672 - protein, 81 aa, Artificial
  HIV Vpu
MQSLVILAIVGLIVAFIAAIVVWTIVFIEYREIRKQKRIGKLLDRIRERAEDSGNESDGDTEELVTLVEMGDFDPWVGDNL

SEQ ID NO: 1673 - protein, 79 aa, Artificial
  HIV Vpu
MNILGIGIGALVVAFIIAIVVWTIAYIEYRKLKQRKIDRLIERIRERAEDSGNESDGDTEELSKLVEMGHLNLGYVADL

SEQ ID NO: 1674 - protein, 77 aa, Artificial
  HIV Vpu
MYIIGIGIGALIVAFIIAIVVWTIVYIEYRKLVKQKKIDRLIQRIIEGAEDSGNESDEELSTMVERGHLTFGYVADL

SEQ ID NO: 1675 - protein, 80 aa, Artificial
  HIV Vpu
MYILGLGIGALVVTFIIAVIVWTIVYIEYKKLVRQKKIDRLIERIGERAEDSGNESDGDTEELSKLMEMGHLNLGYVADL

SEQ ID NO: 1676 - protein, 81 aa, Artificial
  HIV Vpu
MVSLQIVAIVALIVAFFLAICVWTIVYIEYKKLLRQRKIDKLINRIRERAEDSGNESDGDTDELAELVEMGPHDLWNVNDL

SEQ ID NO: 1677 - protein, 81 aa, Artificial
  HIV Vpu
MIPLQIAAIVAFIVAIFLAIGMWTIVYIEYKKLLRQRKIDKLIDRIRERAEDSGNESDGDTEELADLVERGPHDLWNVNDL

SEQ ID NO: 1678 - protein, 80 aa, Artificial
  HIV Vpu
MVPLTVGIIALVAALILAIIVWTIAYLEYRKVVRQKRINWLFDRIRERAEDSGNESEGDTEELAALGETGHLILGDINNL

SEQ ID NO: 1679 - protein, 80 aa, Artificial
  HIV Vpu
MVSLAISIVALVVALILAIIVWTIVYIEYRKLVKQKRINWLIDRIRERAEDSGNESEGDAEELADIGELGHLILGNIDNL

SEQ ID NO: 1680 - protein, 83 aa, Artificial
  HIV Vpu
MLSLGFIALGAAVSIAVIVWALLYREYKKIKLQEKIKHIRQRIREREEDSGNESDGDAEWLDGDEEWLVTLLSSSKLDQGNWV

SEQ ID NO: 1681 - protein, 85 aa, Artificial
  HIV Vpu
MHHRDLLAIIIISALLFINVILWGFILRKYLEQKEQDRKEREILERLRRIREIRDDSDYESNGEEEQEVMDLVLSHGFDNPMFEP

SEQ ID NO: 1682 - protein, 85 aa, Artificial
  HIV Vpu
MHQENLLALIALSALCLINVLIWLFNLRIYLVQRKQDRREQEILERLRRIKEIRDDSDYESNEEEQQEVMELIHSHGFANPMFEL

SEQ ID NO: 1683 - protein, 85 aa, Artificial
  HIV Vpu
MHHRDLLALITTSALLLTNVVLWTFILRQYLKQKKQDKREREILERLRRIRQIEDDSDYESDGTEEQEVRDLVHSYGFDNPMFEL

SEQ ID NO: 1684 - protein, 85 aa, Artificial
  HIV Vpu
MHHRDLLTLIIISALLLTNVILWAFILRQYLRQKKQDRREREILERLRRIRQIEDDSDYESDGKEEQEVRDLVHGYGFDNPMFEP

SEQ ID NO: 1685 - protein, 81 aa, Artificial
  HIV Vpu
MSILQIVAIVAIIVALILAIVVWTIVYIEYKRLLRQRKIDWLIDRIRERAEDSGNESEGDTEELSTLVEMEPDNFRNDNDM

SEQ ID NO: 1686 - protein, 845 aa, Artificial
  HBV Polymerase
MPLSYQHFRKLLLLDDGTEAGPLEEELPRLADADLNRRVAEDLNLGNLNVSIPWTHKVGNFTGLYSSTAPIFNPEWQTPSFPKIHLQEDIINRCQQFVGPLTVNEKRRLKLIMPARFYPTHTKYLPLDKGIKPYYPDQVVNHYFQTRHYLHTLWKAGILYKRETTRSASFCGSPYSWEQELQHGRLVIKTSQRHGDESFCSQPSGILSRSSVGPCIRSQLKQSRLGLQPHQGPLASSQPGRSGSIRARVHPSTRRCFGVEPSGSGHVDPSVNNSSSCLRQSAVRKAAYSHLSTSKRQSSSGHAVEFHCLPPSSARPQSQGSVFSCWWLQFRNSKPCSEYCLSHLVNLREDRGPCDEHGEHHIRIPRTPARVTGGVFLVDKNPHNTAESRLVVDFSQFSRGITRVSWPKFAIPNLQSLTNLLSSNLSWLSLDVSAAFYHIPLHPAAMPHLLIGSSGLSRYVARLSSNSRINNNQYGTMQNLHDSCSRQLYVSLMLLYKTYGWKLHLYSHPIVLGFRKIPMGVGLSPFLLAQFTSAICSVVRRAFPHCLAFSYMDDVVLGAKSVQHREFLYTAVTNFLLSLGIHLNPNKTKRWGYSLNFMGYVIGSWGTLPQDHIVQKIKHCFRKLPVNRPIDWKVCQRIVGLLGFAAPFTQCGYPALMPLYACIQAKQAFTFSPTYKAFLSKQYMNLYPVARQRPGLCQVFADATPTGWGLAIGHQRMRGTFVAPLPIHTAELLAACFARSRSGAKLIGTDNSVVLSRKYTSFPWLLGCAANWILRGTSFVYVPSALNPADDPSRGRLGLSRPLLRLPFQPTTGRTSLYAVSPSVPSHLPVRVHFASPLHVAWRPP

SEQ ID NO: 1687 - protein, 845 aa, Artificial
  HBV Polymerase
MPLSYQHFRKLLLLDDGTEAGPLEEELPRLADADLHRRVAEDLNLGNLNVSIPWTHKVGNFTGLYSSTVPIFNPEWQTPSFPKIHLQEDIINRCQQFVGPLTVNEKRRLKLIMPARFYPTHTKYLPLDKGIKPYYPDQVVNHYFQTRHYLHTLWKAGILYKRETTRSASFCGSPYSWEQELQHGRLVIKTSQRHGDESFCSQSSGILSRSSVGPCIRSQLKQSRLGLQPRQGRLASSQPSRSGSIRAKAHPSTRRYFGVEPSGSGHIDHSVNNSSSCLHQSAVRKAAYSHLSTSKRQSSSGHAVEFHCLPPNSAGSQSQGSVSSCWWLQFRNSKPCSEYCLSHLVNLREDWGPCDEHGEHHIRIPRTPARVTGGVFLVDKNPHNTAESRLVVDFSQFSRGISRVSWPKFAVPNLQSLTNLLSSNLSWLSLDVSAAFYHIPLHPAAMPHLLIGSSGLSRYVARLSSNSRINNNQYGTMQNLHDSCSRQLYVSLMLLYKTYGWKLHLYSHPIVLGFRKIPMGVGLSPFLLAQFTSAICSVVRRAFPHCLAFSYMDDVVLGAKSVQHRESLYTAVTNFLLSLGIHLNPNKTKRWGYSLNFMGYIIGSWGTLPQDHIVQKIKHCFRKLPVNRPIDWKVCQRIVGLLGFAAPFTQCGYPALMPLYACIQAKQAFTFSPTYKAFLSKQYMNLYPVARQRPGLCQVFADATPTGWGLAIGHQRMRGTFVAPLPIHTAELLAACFARSRSGAKLIGTDNSVVLSRKYTSFPWLLGCTANWILRGTSFVYVPSALNPADDPSRGRLGLSRPLLRLPFQPTTGRTSLYAVSPSVPSHLPVRVHFASPLHVAWRPP

SEQ ID NO: 1688 - protein, 843 aa, Artificial
  HBV Polymerase
MPLSYQHFRKLLLLDDEAGPLEEELPRLADEGLNRRVAEDLNLGNLNVSIPWTHKVGNFTGLYSSTVPSFNPQWQTPSFPDIHLQEDIINKCKQFVGPLTVNEKRRLKLIMPARFYPNVTKYLPLDKGIKPYYPEHVVNHYFQTRHYLHTLWKAGILYKRETTRSASFCGSPYSWEQELQHGRLVLQTSTRHGDKSFRPQSSGILSRSPVGPCIQSQLRQSRLGPQPTQGQLAGLQQGGSGSIRAGIHSTPWGTVGVEPSSSGHTHNCANSSSSCLHQSAVRKEAYSPVSTSKRHSSSGNAVELHHVPPNSSRSQSQGSVLSCWWLQFRNSKPCSEHCLFHIVNLIDDWGPCAEHGEHRIRTPRTPARVTGGVFLVDKNPHNTSESRLVVDFSQFSRGNTRVSWPKFAVPNLQSLTNLLSSDLSWLSLDVSAAFYHLPLHPAAMPHLLVGSSGLSRYVARLSSNSRIINHQHRTMQNLHDSCSRNLYVSLMLLYKTYGRKLHLYSHPIILGFRKIPMGVGLSPFLLAQFTSAICSVVRRAFPHCLAFSYMDDVVLGAKSVQHLESLYAAVTNFLLSLGIHLNPQKTKRWGYSLNFMGYVIGSWGTLPQEHIVLKIKQCFRKLPVNRPIDWKVCQRIVGLLGFAAPFTQCGYPALMPLYACIQAKQAFTFSPTYKAFLNKQYLNLYPVARQRPGLCQVFADATPTGWGLAIGHQRMRGTFVSPLPIHTVELLAACFARSRSGAKLIGTDNSVVLSRKYTSFPWLLGCAANWILRGTSFVYVPSALNPADDPSRGRLGLYRPLLRLPYRPTTGRTSLYADSPSVPSHLPDRVHFASPLHVAWRPP

SEQ ID NO: 1689 - protein, 832 aa, Artificial
  HBV Polymerase
MPLSYQHFRKLLLLDDEAGPLEEELPRLADEDLNRRVAEDLNLGNLNVSIPWTHKVGNFTGLYSSTVPVFNPHWKTPSFPNIHLHQDIIKKCEQFVGPLTVNEKRRLQLIMPARFYPNVTKYLPLDKGIKPYYPEHLVNHYFQTRHYLHTLWKAGILYKRETTRSASFCGSPYSWEQELQHGAESFHQQSSGILSRPPVGSSLQSKHRKSRLGLQSQQGHLARRQQGRSWSIRAGIHPTARRPFGVEPSGSGHNTNLASKSASCIYQSPVRKAAYPAVSTFEKHSSSGHAVELHNFPPNSARSQGERPVFPCWWLQFRNSKPCSDYCLSHIVNLLEDWGPCTEHGEHHIRIPRTPARVTGGVFLVDKNPHNTAESRLVVDFSQFSRGNHRVSWPKFAVPNLQSLTNLLSSNLSWLSLDVSAAFYHLPLHPASMPHLLVGSTGLSRYVARVSSNSRIFNHQRGTMQNLHDYCSRNLYVSLLLLYQTFGRKLHLYSHPIILGFRKIPMGVGLSPFLLAQFTSAICSVVRRAFPHCLAFSYMDDVVLGAKSVQHLESLFTAVTNFLLSLGIHLNPNKTKRWGYSLHFMGYVIGSYGSLPQDHIIQKIKECFRKLPINRPIDWKVCQRIVGLLGFAAPFTQCGYPALMPLYACIQSKQAFTFSPTYKAFLCKQYLNLYPVARQRPGLCQVFADATPTGWGLVMGHQRMRGTFLAPLPIHTAELLAACFARSRSGANILGTDNSVVLSRKYTSFPWLLGCAANWILRGTSFVYVPSALNPADDPSRGRLGIFRPLLRLPFRPTTGRTSLYADSPSVPSHLPVRVHFASPLHVAWRPP

SEQ ID NO: 1690 - protein, 832 aa, Artificial
  HBV Polymerase
MPLSYQHFRRLLLLDDEAGPLEEELPRLADEDLNRRVAEDLNLGNLNVSIPWTHKVGNFTGLYSSTVPVFNPHWKTPSFPNIHLRQDIIKKCEQFVGPLTVNEKRRLQLIMPARFYPKVTKYLPLDKGIKPYYPEHLVNHYFQTRHYLHTLWKAGILYKRETTHSASFCGSPYSWEQELQHGAESFHQQSSGILSRPPVGSSLQSKHSKSRLGLQSQQGHLARRQQGRSWSIRAGIHPTARRPFGVEPSGSGHNTNLASKSASCLYQSPVRKAAYPAVSTFEKHSSSGHAVELHNLPPNSSRSQGERPVFPCWWLQFRNSKPCSDYCLSHIVNLLEDWGPCAEHGEHHIRIPRTPARVTGGVFLVDKNPHNTAESRLVVDFSQFSRGNYRVSWPKFAVPNLQSLTNLLSSNLSWLSLDVSAAFYHLPLHPAAMPHLLVGSSGLSRYVARLSSNSRIFNNQRGTMQNLHDYCSRNLYVSLLLLYQTFGRKLHLYSHPIILGFRKIPMGVGLSPFLLAQFTSAICSVVRRAFPHCLAFSYMDDVVLGAKSVQHLESLFTAVTNFLLSLGIHLNPNKTKRWGYSLNFMGYVIGCYGSLPQDHIIQKIKECFRKLPVNRPIDWKVCQRIVGLLGFAAPFTQCGYPALKPLYACIQSKQAFTFSPTYKAFLCKQYLNLYPVARQRPGLCQVFADATPTGWGLVMGHQRMRGTFLAPLPIHTAELLAACFARSRSGANILGTDNSVVLSRKYTSFPWLLGCAANWILRGTSFVYVPSALNPADDPSRGRLGLSRPLLRLPFRPTTGRTSLYADSPSVPSHLPDRVHFASPLHVAWRPP

SEQ ID NO: 1691 - protein, 832 aa, Artificial
  HBV Polymerase
MPLSYQHFRRLLLLDDEAGPLEEELPRLADEGLNRHVAEELNLGNLNVSIPWTHKVGNFTGLYSSTVPVFNPHWKTPSFPNIHLHQDIIKKCEQFVGPLTVNEKRRLQLIMPARFYPKVTKYLPLDKGIKPYYPEHLVNHYFQTRHYLHTLWKAGVLYKRETTHSASFCGSPYSWEQELQHGAESFHQQSSGILSRPPVGSSLQSKHCKSRLGLQSQQGLLARRQQGRSWSIRAGIHPTARRPFGVEPSGSGHTTNLASKSASCLHQSPVRKATYPSVSTFEKHSSSGHAVELHNLPPNSARSQSERPVSPCWWLQFRNSKPCSDYCLSHIVNLLEDWGPCAEHGEHHIRIPRTPARVTGGVFLVDKNPHNTEESRLVVDFSQFSRGNHRVSWPKFAVPNLQSLTNLLSSNLSWLSLDVSAAFYHLPLHPAAMPHLLVGSSGLSRYVARLSSDSRIFNHQHGTMQNLHDSCSRNLYVSLLLLYQTFGRKLHLYSHPIILGFRKIPMGVGLSPFLLAQFTSAICSVVRRAFPHCLAFSYMDDVVLGAKTVHHLESLFTAVTNFLLSLGIHLNPNKTKRWGYSLHFMGYVIGCYGSLPQDHIIQKIKECFRKLPVNRPIDWKVCQRIVGLLGFAAPFTQCGYPALMPLYACIQSKQAFTFSPTYKAFLCKQYLNLYPVARQRPGLCQVFADATPTGWGLVMGHQRMRGTFQAPLPIHTAELLAACFARSRSGANILGTDNSVVLSRKYTSFPWLLGCAANWILRGTSFVYVPSALNPADDPSRGRLGLSRPLLRLPFRPTTGRTSLYADSPSVPSHLPDRVHFASPLHVAWRPP

SEQ ID NO: 1692 - protein, 832 aa, Artificial
  HBV Polymerase
MPLSYQHFRRLLLLDDEAGPLEEELPRLADEGLNRRVAEDLNLGNLNVSIPWTHKVGNFTGFYSSTVPVFNPHWETPSFPNIHLHQDIIKKCEQFVGPLTVNEKRRLQLIMPARFYPKVTKYLPLDKGIKPYYPEHLVNHYFQTRHYLHTLWKAGILYKRETTHSASFCGSPYSWEQDLQHGAESIHQQSSGILSRPPVGSSLQSKHRKSRLGLQSQQGHLARRQQGWSWSIRAGTHPTARRPFGVEPSGSGHTTHRASKSASCLYQSPDRKATYPSVSTFERHSSSGRAVELHNFPPNSARSQSERPIFPCWWLQFRNSKPCSDYCLSLIVNLLEDWGPCDEYGEHHIRIPRTPARVTGGVFLVDKNPHNTAESRLVVDFSQFSRGNYRVSWPKFAVPNLQSLTNLLSSNLSWLSLDVSAGFYHLPLHPAAMPHLLVGSSGVSRYVARLSSNSRNNNNQYGTMQNLHDSCSRQLYVSLMLLYQNFGWKLHLYSHPIVLGFRKIPMGVGLSPFLLAQFTSAICSVVRRAFPHCLAFSYMDDVVLGAKSVQHLESLFTAVTNFLLSLGIHLNPNKTKRWGYSLHFMGYVIGCYGSLPQEHIIQKIKECFRKVPVNRPIDWKVCQRIVGLLGFAAPFTQCGYPALMPLYACIQFKQAFTFSPTYKAFLCKQYLNLYPVARQRPGLCQVFADATPTGWGLGMGHQRMRGTFSAPLPIHTAELLAACFARSRSGANILGTDNSVVLSRKYTSFPWLLGCAANWILRGTSFVYVPSALNPADDPSRGRLGLSRPLLCLPFRPTTGRTSLYADSPSVPSHLPDRVHFASPLHVAWRPP

SEQ ID NO: 1693 - protein, 832 aa, Artificial
  HBV Polymerase
MPLSCPHFRKLLLLDEEAGPLEEELPRLADEGLNRRVAEDLNLQLPNVSIPWTHKVGNFTGLYSSTVPVFNPKWQTPSFPDIHLHQDIINKCEQFVGPLTVNEKRRLKLIIAARFYPNAPKYLPLDKGIKPYYPEHVVNHYFQTRHYLHILWKAGILYKRETTRSASFCGSPYSWEQELQHGAEPVCQQSLGILPRASVGSPVQSQLKQSRLGLQSQQRQLARSHQGRSGSIRARVHSTTRRSFRVELSGSGSNHNIASTSSSCRHQSAVRETAYSHLSTVERHSSSGHEVELYSIPPNSARSQSTGPILSCWWLQFRNSEPCSDYCLSHLVNLLEDWGPCTEHGEHHIRIPRTPARVTGGVFLVDKNPHNTTESRLVVDFSQFSRGSTRVSWPKFAVPNLQSLTNLLSSNLSWLSLDVSAAFYHLPLHPAAMPHLLVGSSGLSRYVARLSSTSRIIDHQHGTMQNLHDHCSRNLFVSLMLLYKTFGRKLHLYSHPIVLGFRKIPMGVGLSPFLLAQFTSSICSVVRRAFPHCLAFSYMDDLVLGAKSVQHLESIYTAVTNFLLSLGIHLNPNKTKRWGYSLNFMGYIIGSWGSLPQDHIVQKIKQCFRKLPVNRPIDWKVCQRIVGLLGFAAPFTQCGYPALMPLYACIQAKQAFTFSPTYKAFLRTQYLTLYPVARQRPGLCQVFADATPTGWGLAIGHQRMRGTFVAPLPIHTAELLAACFARSRSGANIIGTDNSVVLSPKYTSFPWLLGCAANWILRRTSFVYVPSALNPADDPSRGRLGLYRPLLRPWFRPTTGRTSLYAVSPSVPSHLPVRVHFASPLHVAWRPP

SEQ ID NO: 1694 - protein, 843 aa, Artificial
  HBV Polymerase
MPLSYPHFRKLLLLDDEAGPLEEELPRLADEDLNRRVAADLNLQLPNVSIPWTHKVGNFTGLYSSTVPAFNPNWSTPSFPDIHLHQDLISKCEQFVGPLTKNELRRLKLVMPARFYPKVTKYFPMDKGIKPYYPEHAVNHYFKTRHYLHTLWKAGILYKRESTRSASFCGSPYSWEQELQHGSTSLNDTKRHGTESLCAQSSGILSRPSAGSAIQSKFQQSRLGLQHKQGQLANGKQGRSGRLRSRVHTPTRWPAGVEPSSTRCVNNLASRSASCFHQSAVREKANPSLSTSKRHTSTGNAVELNPVPPSSVGSQGKGSVLPCWWLQFRDTEPCSDYCLSHIINLLEDWGPCYEHGQHYIRTPRTPARVTGGVFLVDKNPHNTTESRLVVDFSQFSRGTTRVSWPKFAVPNLQSLTNLLSSNLSWLSLDVSAAFYHLPLHPAAMPHLLVGSSGLSRYVARLSSTSRIHDHQHGTLQNLHNSCTRNLYVSLLLLFQTLGRKLHLYSHPIILGFRKIPMGVGLSPFLLAQFTSAICSVVRRAFPHCLAFSYMDDLVLGAKSVQHLESLYTAVTNFLLSVGIHLNTSKTKRWGYSLHFMGYVIGSWGSLPQDHIVHKIKECFRKLPVNRPIDWKVCQRIVGLLGFAAPFTQCGYPALMPLYACITAKQAFVFSPTYKAFLCKQYMNLYPVARQRPGLCQVFADATPTGWGLAIGHQRMRGTFVAPLPIHTAELLAACFARSRSGATLIGTDNSVVLSRKYTSFPWLLGCAANWILRGTSFVYVPSALNPADDPSRGRLGLYRPLLRLPFQPTTGRTSLYADSPSVPSHLPDRVHFASPLHVAWRPP

SEQ ID NO: 1695 - protein, 540 aa, Artificial
  HBV Polymerase
LHNIPPSSARSQSEGPIFSCWWLQFRNSKPCSDYCLTHIVNLLEDWGPCTEHGEHNIRIPRTPARVTGGVFLVDKNPHNTTESRLVVDFSQFSRGSTHVSWPKFAVPNLQSLTNLLSSNLSWLSLDVSAAFYHIPLHPAAMPHLLVGSSGLPRYVARLSSTSRNINYQHGTMQNLHDSCSRNLYVSLLLLYKTFGRKLHLYSHPIILGFRKIPMGVGLSPFLLAQFTSAICSVVRRAFPHCLAFSYMDDVVLGAKSVQHLESLFTSITNFLLSLGIHLNPNKTKRWGYSLNFMGYVIGSWGTLPQEHIVQKLKQCFRKLPVNRPIDWKVCQRIVGLLGFAAPFTQCGYPALMPLYACIQSKQAFTFSPTYKAFLCKQYLNLYPVARQRSGLCQVFADATPTGWGLAIGHRRMRGTFVAPLPIHTAELLAACFARSRSGAKLIGTDNSVVLSRKYTSFPWLLGCAANWILRGTSFVYVPSALNPADDPSRGRLGLYRPLLHLPFRPTTGRTSLYAVSPSVPSHLPDRVHFASPLHVAWRPP

SEQ ID NO: 1696 - protein, 540 aa, Artificial; identical to SEQ ID NO: 1695
  HBV Polymerase

SEQ ID NO: 1697 - protein, 303 aa, Artificial
  HBV Polymerase
MPLSYQHFRKLLLLDDEAGPLEEELPRLADEGLNRRVAEDLNLGNLNVSIPWTHKVGNFTGLYSSTVPVFNPDWKTPSFPHIHLQEDIINRCQQYVGPLTVNEKRRLKLIMPARFYPNLTKYLPLDKGIKPYYPEYAVNHYFKTRHYLHTLWKAGILYKRETTRSASFCGSPYSWEQELQHGRLVFQTSTRHGDESFCSQSSGILSRSPVGPCVRSQLKQSRLGLQPQQGSLARGKSGRSGSIWSRVHPTTRRPFGVEPSGSGHIDNTASSTSSCLHQSAVRKTAYSHLSTSKRQSSSGHAVE

SEQ ID NO: 1698 - protein, 303 aa, Artificial; identical to SEQ ID NO: 1697
  HBV Polymerase

SEQ ID NO: 1699 - protein, 842 aa, Artificial
  HBV Polymerase
MPLSYQHFRKLLLLDDEAGPLEEELPRLADEDLNRRVAEDLNLGNLNVSIPWTHKVGNFTGLYSSTVPVFNPEWQTPSFPHIHLQEDIINRCQQYVGPLTVNEKRRLKLIMPARFYPKLTKYLPLDKGIKPYYPEHAVNHYFKTRHYLHTLWKAGILYKRETTRSASFCGSPYSWEQELQHGRLVFQTSTRHGDESFCSQSSGILSRSPVGPCVRSQLKQSRLGLQPQQGSLARGKSGRSGSIRARVPPTTRRSFGVEPSGSGHIDNRASSTSSCLHQSAVRKTAYSHLSTSKRQSSSGHAVELHHISPSPARSQSEGPIFSSWWLQFRNSKPCSDYCLTHIVNLLEDWGPCTEHGEHNIRIPRTPARVTGGVFLVDKNPHNTTESRLVVDFSQFSRGSTHVSWPKFAVPNLQSLTNLLSSNLSWLSLDVSAAFYHIPLHPAAMPHLLVGSSGLPRYVARLSSTSRNINHQHGTMQDLHDSCSRNLYVSLLLLYKTFGRKLHLYSHPIILGFRKIPMGGGLSPFLLAQFTSAICSVVRRAFPHCLAFSYMDDVVLGAKSVQHLESLFTSITNFLLSLGIHLNPNKTKRWGYSLNFMGYVIGSWGTLPQEHIVLKIKQCFRKLPVNRPIDWKVCQRIVGLLGFAAPFTQCGYPALMPLYACIQSKQAFTFSPTYKAFLCKQYLHLYPVARRTALCQVFADATPTGWGLAIGHRRMRGTFVAPLPIHTAELLAACFARSRSGAKLIGTDNSVVLSRKYTSFPWLLGCAANWILRGTYFVYVPSALNPADDPSRGRLGLIRPLLHLRFRPTTGRTSLYAVSPSVPSHLPDRVHFASPLHVAWRPP

SEQ ID NO: 1700 - protein, 843 aa, Artificial
  HBV Polymerase
MPLSYQHFRKLLLLDDEAGPLEEELPRLADEGLNRRVAEDLNLGNLNVSIPWTHKVGNFTGLYSSTVPVFNPEWQTPSFPHIHLQEDIINRCQQYVGPLTVNEKRRLKLIMPARFYPNLTKYLPLDKGIKPYYPEHAVNHYFKTRHYLHTLWKAGILYKRETTRSASFCGSPYSWEQELQHGRLVFQTSTRHGDESFCSQSSGILSRSPVGPCVRSQLKQSRLGLQPQQGSMARGKSGRSGSIRARVHPTTRRSFGVEPSGSGHIDNSASSTSSCLHQSAVRKTAYSHLSTSKRQSSSGHAVEFHNIPPSSARSQSEGPIFSCWWLQFRNSKPCSDYCLTHIVNLLEDWGPCTEHGEHNIRIPRTPARVTGGVFLVDKNPHNTTESRLVVDFSQFSRGSTHVSWPKFAVPNLQSLTNLLSSNLSWLSLDVSAAFYHIPLHPAAMPHLLVGSSGLPRYVARLSSTSRNINHQHGAMQDLHDSCSRNLYVSLLLLYKTFGRKLHLYSHPIILGFRKIPMGVGLSPFLLAQFTSAICSVVRRAFPHCLAFSYMDDVVLGAKSVQHLESLFTSITNFLLSLGIHLNPNKTKRWGYSLNFMGYVIGSWGTLPQEHIVLKLKQCFRKLPVNSPIDWKVCQRIVGLLGFAAPFTQCGYPALMPLYACIQSKQAFTFSPTYKAFLCKQYLNLYPVARQRSGLCQVFADATPTGWGLAIGHRRMRGTFVAPLPIHTAELLAACFARSRSGAKLIGTDNSVVLSRKYTSFPWLLGCAANWILRGTSFVYVPSALNPADDPSRGRLGLYRPLLLLPFRPTTGRTSLYAVSPSVPSHLPDRVHFASPLHVAWRPP

SEQ ID NO: 1701 - protein, 827 aa, Artificial
  HBV Polymerase
  misc_feature (385)..(385): Xaa can be any naturally occurring amino acid
  misc_feature (452)..(452): Xaa can be any naturally occurring amino acid
  misc_feature (619)..(619): Xaa can be any naturally occurring amino acid
MPLSYQHFRKLLLLDDEAGPLEEELPRLADEGLNRRVAEDLNLGNLNVSIPWTHKVGNFTGLYSSTVPVFNPEWQTPSFPNIHLQEDIINRCQQYVGPLTVNEKRRLKLIMPARFYPNLTKYLPLDKGIKPYYPEHAVNHYFKTRHYLHTLWKAGILYKRETTRSASFCGSPYSWEQELQHGRLVFQTSTRHGDESFCSQSSGILSRSPVGPGVRSQLKQSRLGLQPQQGSLARGKSGRSGSIRARVHPTTRRSFGVEPSGSGHIDNSARSASSCLHQSAVRKTAYSHLSTSKRQSSSGHAVELHPCWWLQFRNSKPCSDYCLTHIVNLLEDWGPCTEHGEHNIRIPRTPARVTGGVFLVDKNPHNTTESRLVVDFSQFSRGSTXVSWPKFAVPNLQSLTNLLSSNLSWLSLDVSAAFYHIPLHPAAMPHLLVGSSGLPRYVARLSSTSRNXNYQHGTMQDLHESCSRNLYVSLLLLYKTFGRKLHLYSHPIILGFRKIPMGVGLSPFLLAQFTSAICSVVRRAFPHCLAFSYMDDVVLGAKSVQHLESLFTAITNFLLSLGIHLNPHKTKRWGYSLNFMGYVIGSWGTLPQEHIVQKIKQCFRKLPVNRPIDWKVCQXIVGLLGFAAPFTQCGYPALMPLYACIQAKQAFTFSPTYKAFLCKQYLHLYPVARQRSGLCQVFADATPTGWGLAIGHRRMRGTFVAPLPIHTAELLAACFARSRSGAKLIGTDNSVVLSRKYTSFPWLLGCAANWILRGTSFVYVPSALNPADDPSRGRLGLYRPLLHLPFRPTTGRTSLYAVSPSVPSHLPDRVHFASPLHVAWRPP

SEQ ID NO: 1702 - protein, 825 aa, Artificial
  HBV Polymerase
  misc_feature (369)..(369): Xaa can be any naturally occurring amino acid
  misc_feature (452)..(452): Xaa can be any naturally occurring amino acid
  misc_feature (491)..(491): Xaa can be any naturally occurring amino acid
MPLSYQHFRKLLLLDDEAGPLEEELPRLADEDLNRRVAEDLNLGNLNVNIPWTHKVGNFTGLYSSTVPVFNPEWQTPSFPHIHLQEDIINRCQQYVGPLTVNEKRRLKLIMPARFYPNLTKYLPLDKGIKPYYPEHAVNHYFKTRHYLHTLWKAGILYKRETTRSASFCGSPYSWEQELQHGRLVFQTSTRHGDKSFCSQSSGILSRSPVGPCVRSQLKQSRLGLQPQQGSLARGQSGRIGSIRARVHPTTRRSFGVEPSGSGHIDNSASSPSSCLHQSAVRKTAYCHLSTTKRQSSSGHAVETCWWLQFRNSKPCSDYCLTHIVNLLEDWGPCTEHGEHNIRIPRTPARVTGGVFLVDKNPHNTTESXLVVDFSQFSRGSTQVSWPKFAVPNLQSLTNLLSSNLSWLSLDVSAAFYHIPLHPAAMPHLLVGSSGLPRYVARLSSTSRNINXQHGTMQDLHDSCSKHLYVSLLLLYKTFGRKLHLYSHPIXLGFRKIPMGVGLSPFLLAQFTSAICSVVRRAFPHCLAFSYMDDVVLGAKSVQHLEALYTSITNFLLSLGIHLNPNKTKRWGYSLNFMGYVIGSWGTLPQDHIVQKLKQCFRKLPVNRPIDWKVCQRIVGLLGFAAPFTQCGYPALMPLYACIQSKQAFTFSPTYKAFLCKQYLNLYPVARQRSGLCQVFADATPTGWGLAIGHRRMRGTFVAPLPIHTAELLAACFARSRSGAKLIGTDNSVVLSRKYTSFPWLLGCAANWILRGTSFVYVPSALNPADDPSRGRLGLYRPLLHLPFRPTTGRTSLYAVSPSVPSHLPDRVHFASPLHVAWRPP

SEQ ID NO: 1703 - protein, 843 aa, Artificial
  HBV Polymerase
MPLSYQHFRKLLLLDNEAGPLEEELPRLADEDLNRRVAEDLNLGNLNVSIPWTHKVGNFTGLYSSTVPVFNPEWKTPSFPNIHLQEDIIDRCQQYVGPLTVNEKRRLKLIMPARFYPNLTKYLPLDKGIKPYYPEHAVNHYFQTRHYLHTLWKAGILYKRETTRSASFCGSPYSWEQELQHGRLVFQTSTRHGDESFCSQSSGILSRSPVGPCVRSQLKQSRLGLQPQQGSLARGKAGRSGSIRARVHPTTRRPFGVEPSGSGHIDNSASSASSCFHQSAVRKTAYSHLSTSKRQSSSGHAVELHNIPPSSARSKSEGPLFPCWWLQFRNSKPCSDYCLTHIVNLLEDWGPCTEHGEHNIRIPRTPARVTGGVFLVDKNPHNTTESRLVVDFSQFSRGNTQVSWPKFAVPNLQSLTNLLSSNLSWLSLDVSAAFYHIPLHPAAMPHLLVGSSGLQRYVARLSSTSRNINYQHGTMQDLHDSCSKHLYVSLLLLYKTFGRKLHLYSHPIILGFRKIPMGVGLSPFLLAQFTSAICSVVCRAFPHCLAFSYMDDVVLGAKSVQHLESLFTSITNFMLSLGIHLNPNKTKRWGYSLNFMGYVIGSWGTLPQEHIVQKLKQCFRKLPVNRPIDWKVCQRIVGLLGFAAPFTQCGYPALMPLYACIQSKQAFTFSPTYKAFLCKQYLNLYPVARQRSGLCQVFADATPTGWGLAIGHQRMRGTFVAPLPIHTAELLAACFARSRSGATLIGTDNSVVLSRKYTSFPWLLGCAANWILRGTSFVYVPSALNPADDPSRGRLGLYRPLLRLSFRPTTGRTSLYAVSPSVPSHLPDRVHFASPLHVAWRPP

SEQ ID NO: 1704 - protein, 843 aa, Artificial
  HBV Polymerase
MPLSYQHFRKLLLLDDEAGPLEEELPRLADEGLNRRVAEDLNLGNLNVSIPWTHKVGNFTGLYSSTVPVFNPECQTPSFPNIHLQEDIINRCQQYVGPLTVNEKRRLKLIMPARFYPNLTKYLPLDKGIKPYYPEHAVNHYFKTRHYLHTLWKAGILYKRETTRSASFCGSPYSWEQELQHGRLVFQTSTRHGDESFCSQSSGILSRSPVGPCVRSQLKQSRLGLQPQQGSLARRNQGRSGRLRARVHPTTRRSFGVEPSGSGHLDNSASSSSSCLHQSAVRKTAYSHLSTSKRQSSSGHAVELHNIPPSSARSQSEGPIFSCWWLQFRNSKPCSDYCLTHIVNLLEDWGPCTEHGEHNIRIPRTPARVTGGVFLVDKNPHNTTESRLVVDFSQFSRGSTHVSWPKFAVPNLQSLTNLLSSNLSWLSLDVSAAFYHIPLHPAAMPHLLVGSSGLPRYVARLSSTSRNINYQHGTMQDLHDSCSRNLYVSLLLVYKTFGRKLHLYSHPIILGFRKIPMGVGLSPFLLAQFTSAICSVVRRAFPHCLAFSYMDDVVLGAKSVQHLESLFTSITNFLLSLGIHLNPNKTKRWGYSLNFMGYVIGSWGTLPQEHIVLKLKQCFRKLPVNRPIDWKVCQRIVGLLGFAAPFTQCGYPALMPLYACIQSKQAFTFSPTYKAFLCQQYLHLYPVARQRSGLCQVFGDATPTGWGLAIGHRRMRGTFVAPLPIHTAELLAACFARSRSGAKLIGTDNSVVLSRKYTSFPWLLGCAANWILRGTSFVYVPSALNPADDPSRGRLGLYRPLLHLPFQPTTGRTSLYAVSPSVPSHLPVRVHFASPLHVAWRPP

SEQ ID NO: 1705 - protein, 845 aa, Artificial
  HBV Polymerase
  misc_feature (322)..(322): Xaa can be any naturally occurring amino acid
MPLSYQHFRKLLLLDDGTEAGPLEEELPRLADEGLNRRVAEDLNLGNLNVSIPWTHKVGNFTGLYSSTVPVFNPEWQTPSFPNIHLQEDIINRCQQFVGPLTVNEKRRLKLIMPARFYPNLTKYLPLDKGIKPYYPEHAVNHYFQTRHYLHTLWKAGILYKRETTRSASFCGSPYSWEQELQHGRLVFQTSTRHGDESFCSQSSGILSRSPVGPCVRSQLKQSRLGLQPQQGSLARGQQGRSGSIRARVHPTTRRPFGVEPSGSGHIDNSASSSSSCLHQSAVRKTAYSHLSTSKRQSSSGHAVELHNIPPSSARSQSEGPXFSCWWLQFRNSKPCSDYCLSHIVNLLEDWGPCTEHGEHHIRIPRTPARVTGGVFLVDKNPHNTTESRLVVDFSQFSRGSTRVSWPKFAVPNLQSLTNLLSSNLSWLSLDVSAAFYHIPLHPAAMPHLLVGSSGLSRYVARLSSTSRNINHQHGTMQNLHDSCSRNLYVSLLLLYKTFGRKLHLYSHPIILGFRKIPMGVGLSPFLLAQFTSAICSVVRRAFPHCLAFSYMDDVVLGAKSVQHLESLFTAVTNFLLSLGIHLNPNKTKRWGYSLNFMGYVIGSWGTLPQEHIVQKIKQCFRKLPVNRPIDWKVCQRIVGLLGFAAPFTQCGYPALMPLYACIQSKQAFTFSPTYKAFLCKQYLNLYPVARQRPGLCQVFADATPTGWGLAIGHQRMRGTFVAPLPIHTAELLAACFARSRSGAKLIGTDNSVVLSRKYTSFPWLLGCAANWILRGTSFVYVPSALNPADDPSRGRLGLYRPLLRLPFRPTTGRTSLYAVSPSVPSHLPDRVHFASPLHVAWRPP

SEQ ID NO: 1706 - protein, 3037 aa, Artificial
  HCV
MSTNPKPQRKTKRNTNRRPQDVKFPGGGQIVGGVYLLPRRGPRLGVRAARKTSERSQPRGRRQPIPKDRRSTGKSWGRPGYPWPLYRNEGLGWAGWLLSPRGSRPSWGPSDPRHKSRNLGKVIDTLTCGFADLMGYIPVVGAPVGGVARALAHGVRVLEDGINYATGNLPGCSFSIFLLALLSCISVPVSAVEVRNTSSSYMATNDCSNSSIVWQLEGAVLHTPGCVPCEKTGNKSRCWVPVTPNIAINQPGALTKGLRAHIDVIVMSATLCSALYVGDVCGALMIAAQVVVVSPQHHHFVQECNCSIYPGKITGHRMAWDMMMNWSPTTTMLLAYLVRIPEVVLDIITGGHWGVMFGLAYFSMQGAWAKVVVILLLTAGVEASTYTTGAVVGRSTHLFTSMFSLGSQQRVQLIHTNGSWHINRTALNCNDSLETGFLAALFYTSSFNSSGCPERLAACRSIESFRIGWGSLEYEESVTNDADMRPYCWHYPPRPCGIVPARTVCGPVYCFTPSPVVVGTTDRAGAPTYNWGENETDVFLLNSTRPPKGAWFGCTWMNGTGFTKTCGAPPCRIRKDFNASEDLLCPTDCFRKHPGATYIKCGAGPWLTPRCLVDYPYRLWHYPCTVNYTIYKVRMFVGGIEHRLQAACNFTRGDRCNLEDRDRSQLSPLLHSTTEWAILPCSYTDLPALSTGLLHLHQNIVDVQYLYGLSPAITKYVVKWEWVVLLFLLLADARVCACLWMLLLLGQAEAALEKLVILHAASAASSNGLLYFILFFVAAWCIKGRAVPMVTYTLLGCWSFVLLLMALPHQAYALDAAEQGQIGMALLIAITAFTITPAYKILLSRCLWWTCYMLVLAEALIQDWIPPLQARGGRDGVIWAMTMFYPGVVFDITKWLLAILGPGYLFRAAVMRTPYFVRANALLRMCALVKQLAGGKYVQVALITLGKWTGTYIYDHLSPMSDWAADGLRDLAVAVEPIVFSPMERKVIVWGAETTACGDIIHGLPVSARLGQEVLLGPADGYTSKGWRLLAPITAYAQQTRGLLSAIVVSMTGRDKTDQAGEIQVLSTVTQSFLGTSISGVLWTVFHGAGNKTLAGSRGPVTQMYSSAEGDLVGWPSPPGTRSLEPCTCGAVDLYLVTRNADVIPARRRGDRRGALLSPRPLSSLKGSSGGPVLCPRGHAVGIFRAAVCSRGVAKSIDFIPVESLDVVTRSPNFTDNSTPPAVPQTYQVGYLHAPTGSGKSTKVPAAYAAQGYKVLVLNPSVAATLGFGAYMSKAYGINPNIRTGVRTVTTGDAITYSTYGKFLADGGCSGGAYDVIICDECHSVDSTTILGIGTVLDQAETAGVRLTVLATATPPGSVTTPHPNIEEVALGHEGEIPFYGKAIPLSAIKGGRHLIFCHSKKKCDELAVALRGMGLNAVAYYRGLDVSIIPTQGDVVVVATDALMTGYTGDFDSVIDCNVAVTQVVDFSLDPTFTITTQTVPQDSVSRSQRRGRTGRGRLGIYRYVSSGERASGMFDTVVLCECYDAGAAWYELTPAETTVRLRAYFNTPGLPVCQDHLEFWEAVFTGLTHIDAHFLSQTKQAGEGFPYLVAYQATVCARAKAPPPSWDVMWKCLIRLKPTLVGPTPLLYRLGSVTNEVTLTHPVTKYIATCMQADLEIMTSTWVLAGGVLAAVAAYCLATGCVSIIGRIHVNQKTIIAPDKEVLYEAFDEMEECASRTALIEEGHRIAEMLKSKIQGLMQQASKQAQGVQPAVQATWPKLEQFWAKHMWNFISGIQYLAGLSTLPGNPAVASMMSFSAALTSPLSTSTTILLNIMGGWLASQIAPPAGATGFVVSGLVGAAVGSIGLGKILVDVLAGYGAGISGALVAFKIMSGEKPSVEDVVNLLPAILSPGALVVGVICAAILRRHVGQGEGAVQWMNRLIAFASRGNHVAPTHYVAESDASQRVTQLLGSLTITSLLRRLHQWITEDCPVPCSGSWLRDVWDWVCSILIDFKNWLSAKLFPRLPGIPFISCQKGYRGTWAGTGIMTTRCPCGANITGNVRLGTMRISGPKTCLNTWQGTFPINCYTEGSCVPKPAPNFKTAIWRVAASEYAEVTQHDSHAYVTGLTADNLKVPCQLPCPEFFSWVDGVQIHRFAPTPKAFMRDEVSFSVGLNSYVVGSQLPCEPEPDTEVLASMLTDPSHITAEAAARRLARGSPPSAASSSASQLSAPSLRATCTTHAKCPDIDMVDANLFCWCTMGGNMTRIESESKVLMVDSFDPVVDKEDEREPSIPSEYLLPKSRFPPALPPWARPDYNPPLLETWKRPDYQPPVVAGCALPPPGTTPVPPPRRRRAVVLDQSNVGEALKELAIKSFGCPPPSGDPGHSTGGGTTGETSKSPPDEPDDSEAGSVSSMPPLEGEPGDPDLEPEQVEHPAPPQEGGAAPGSDSGSWSTCSDVDDSVVCCSMSYSWTGALITPCSPEEEKLPINPLSNSLLRYHNKVYCTTSRSASQRAKKVTFDRVQLLDSHYESVLKDVKQAATKVSAKLLSIEEACALTPPHSARSKYGFGAKEVRSLSRRAVDHIKSVWEDLLEDHCSPIDTTIMAKNEVFCVDPTKGGKKPARLIVYPDLGVRVCEKMALYDITQKLPVAVMGQSYGFQYSPAQRVDFLLQAWKEKKTPMGFSYDTRCFDSTVTERDIRTEESIYLSCSLPEEARTAIHSLTERLYVGGPMTNSKGQSCGYRRCRASGVLTTSMGNTLTCYVKAKAACNAAGIVAPTMLVCGDDLVVISESQGVEEDERNLRVFTEAMTRYSAPPGDPPKAEYDLELITSCSSNVSVALDPRGRRRYYLTRDPTTPLARAAWETARHSPVNSWLGNIIQYAPTVWVRMVLMTHFFSVLMAQDTLDQDLNFEMYGAVYSVSPLDLPAIIERLHGLEAFSLHSYSPHELTRVAAALRKLGAPPLRAWKSRARAVRASLISRGGSAATCGRYLFNWAVRTKLKLTPLPAARLLDLSSWFTVSAGGGDIYHSVSRARPRLLLLGLLLLCVGVGIFLLPAR

SEQ ID NO: 1707 - protein, 3010 aa, Artificial
  HCV
MSTNPKPQRKTKRNTNRRPQDVKFPGGGQIVGGVYLLPRRGPRLGVRATRKTSERSQPRGRRQPIPKARRPEGRTWAQPGYPWPLYGNEGLGWAGWLLSPRGSRPSWGPNDPRRRSRNLGKVIDTLTCGFADLMGYIPLVGAPLGGAARALAHGVRVLEDGVNYATGNLPGCSFSIFLLALLSCLTIPASAYEVRNVSGIYHVTNDCSNSSIVYEAADVIMHAPGCVPCVRENNSSRCWVALTPTLAARNASVPTTTLRRHVDLLVGTAAFCSAMYVGDLCGSVFLISQLFTFSPRRHETVQDCNCSIYPGHVSGHRMAWDMMMNWSPTAALVVSQLLRIPQAVMDMVAGAHWGVLAGLAYYSMVGNWAKVLIVMLLFAGVDGHTRVTGGVQGHVTSTLTSLFRPGASQKIQLVNTNGSWHINRTALNCNDSLKTGFLAALFYTHKFNASGCPERMASCRSIDKFDQGWGPITYAQPDNSDQRPYCWHYAPRQCGIVPASQVCGPVYCFTPSPVVVGTTDRFGAPTYNWGDNETDVLLLNNTRPPHGNWFGCTWMNSTGFTKTCGGPPCNIRGVGNNTLTCPTDCFRKHPDATYTKCGSGPWLTPRCLVDYPYRLWHYPCTVNFTIFKVRMYVGGVEHRLDAACNWTRGERCDLEDRDRAELSPLLLSTTEWQILPCSYTTLPALSTGLIHLHQNIVDIQYLYGIGSAVVSIAIKWEYVVLLFLLLADARVCACLWMMLLIAQAEAALENLVVLNAASVVGAHGMLPFFMFFCAAWYMKGRLVPGAAYAFYGVWPLLLLLLALPPRAYAMDREMVASCGGGVFVGLALLTLSPYCKVFLARLIWWLQYFITKAEAHLQVSLPPLNVRGGRDAIILLMCAVHPELIFDITKLLLSILGPLMVLQASLIRVPYFVRAQGLIRACMLVRKAAGGHYVQMAFVKLAALTGTYVYDHLTPLQDWAHVGLRDLAVAVEPVVFSAMETKVITWGADTAACGDIISGLPVSARRGKEILLGPADSFEGQGWRLLAPITAYSQQTRGLLGCIITSLTGRDKNQVEGEVQVVSTAKQSFLATCVNGACWTVFHGAGSKTLAAAKGPITQMYTNVDQDLVGWPAPPGARSLTPCTCGSSDLYLVTRHADVIPVRRRGDSRGSLLSPRPISYLKGSSGGPLLCPSGHVVGIFRAAVCTRGVAKAVDFIPVESMETTMRSPVFTDNSTPPAVPQTFQVAHLHAPTGSGKSTKVPAAYAAQGYMVLVLNPSVAATLGFGAYMSKAHGIDPNIRTGVRTITTGAPITYSTYGKFLADGGCSGGAYDIIICDECHSTDSTSILGIGTVLDQAETVGARFVVLATATPPGSITFPHPNIEEVPLANTGEIPFYAKTIPIEVIRGGRHLIFCHSKKKCDELPAKLSALGLNAVAYYRGLDVSVIPASGDVVVVATDALMTGFTGDFDSVIDCNTCVTQTVDFSLDPTFTIETTTVPQDAVSRTQRRGRTGRGRRGIYRFVTPGERPSAMFDSSVLCECYDAGCAWYELTPAETSVRLRAYLNTPGLPVCQDHLEFWESVFTGLTHIDAHFLSQTKQAGDNFPYLVAYQATVCARAKAPPPSWDQMWKCLIRLKPTLHGPTPLLYRLGAVQNEVTLTHPITKYIMACMSADLEVVTSTWVLVGGVLAALAAYCLTTGSVVIVGRIILSGRPAVIPDREVLYQEFDEMEECASHLPYIEQGMQLAEQFKQKALGLLQTATKQAEAAAPVVESKWRALETFWAKHMWNFISGIQYLAGLSTLPGNPAIASLMAFTASITSPLATQYTLLFNILGGWVAAQLAPPSAASAFVGAGIAGAAVGSIGLGKVLVDILAGYGAGVAGALVAFKVMSGDMPSTEDLVNLLPAILSPGALVVGVVCAAILRRHVGPGEGAVQWMNRLIAFASRGNHVSPTHYVPESDAAARVTQILSNLTITQLLKRLHQWINEDCSTPCSGSWLRDVWDWICTVLADFKTWLQSKLLPRLPGVPFFSCQRGYKGVWRGDGIMYTTCPCGAQITGHVKNGSMRIVGPRTCSNTWHGTFPINAYTTGPCTPSPAPNYSRALWRVAAEEYVEVTRVGDFHYVTGMTTDNVKCPCQVPAPEFFTELDGVRLHRYAPACKPLLRDEVTFQVGLNQYTVGSQLPCEPEPDVTVVTSMLTDPSHITAEAARRRLARGSPPSLAGSSASQLSALSLKATCTTHHGAPDTDLIEANLLWRQEMGGNITRVESENKIVILDSFEPLRAEEDEREVSAAAEILRKTRKFPAAMPVWARPDYNPPLLESWKNPDYVPPVVHGCPLPPTKAPPIPPPRRKRTVVLTESTVSSALAELATKTFGGSGSSAVDSGTATGPPDQASAEGDAGSDAESYSSMPPLEGEPGDPDLSDGSWSTVSEEASEDVVCCSMSYTWTGALITPCAAEESKLPINALSNPLLRHHNMVYSTTSRSASLRQKKVTFDRMQVLDDHYRDVLKEMKAKASTVKAKLLSVEEACKLTPPHSAKSKFGYGAKDVRSLSSRAVNHIRSVWKDLLEDTDTPIQTTIMAKNEVFCVQPEKGGRKPARLIVFPDLGVRVCEKMALYDVVSTLPQAVMGSSYGFQYSPKQRVEFLVNTWKAKKCPMGFSYDTRCFDSTVTENDIRVEESIYQCCDLAPEARQAIRSLTERLYIGGPMTNSKGQNCGYRRCRASGVLTTSCGNTLTCYLKAAAACRAAKLQDCTMLVCGDDLVVICDSAGTQEDAASLRVFTEAMTRYSAPPGDPPQPEYDLELITSCSSNVSVAHDASGKRVYYLTRDPTTPLARAAWETARHTPVNSWLGNIIMYAPTLWARMILMTHFFSILLAQEQLEKALDCQIYGATYSIEPLDLPQIIQRLHGLSAFSLHSYSPGEINRVASCLRKLGVPPLRVWRHRARSVRAKLLSQGGRAATCGKYLFNWAVKTKLKLTPIPEASQLDLSGWFVAGYSGGDIYHSLSRARPRWFMWCLLLLSVGVGIYLLPNR

SEQ ID NO: 1708 - protein, 3008 aa, Artificial
  HCV
MSTNPKPQRKTKRNTNRRPMDVKFPGGGQIVGGVYLLPRRGPRLGVRATRKTSERSQPRGRRQPIPKARRPEGRSWAQPGYPWPLYGNEGCGWAGWLLSPRGSRPSWGPNDPRGRSRNLGKVIDTLTCGFADLMGYIPLVGAPVGSVARALAHGVRALEDGINYATGNLPGCSFSIFLLALLSCLTVPASAVNYRNVSGIYHVTNDCPNSSIVYEADHHIMHLPGCVPCVREGNQSRCWVALTPTVAAPYIGAPLESLRSHVDLMVGAATVCSGLYIGDLCGGLFLVGQMFSFRPRRHWTTQDCNCSIYTGHITGHRMAWDMMMNWSPTTTLVLAQVMRIPTTLVDLLSGGHWGVLVGVAYFSMQANWAKVILVLFLFAGVDAETHVSGAAVGRSTAGLANLFSSGSKQNLQLINSNGSWHINRTALNCNDSLNTGFLASLFYTHKFNSSGCSERLACCKSLDSYGQGWGPLGVANISGSSDDRPYCWHYAPRPCGIVPASSVCGPVYCFTPSPVVVGTTDHVGVPTYTWGENETDVFLLNSTRPPHGAWFGCVWMNSTGFTKTCGAPPCEVNTNNGTWHCPTDCFRKHPETTYAKCGSGPWITPRCLIDYPYRLWHFPCTANFSVFNIRTFVGGIEHRMQAACNWTRGEVCGLEHRDRVELSPLLLTTTAWQILPCSFTTLPALSTGLIHLHQNIVDVQYLYGVGSAVVSWALKWEYVVLAFLLLADARVSAYLWMMFMVSQVEAALSNLININAASAAGAQGFWYAILFICIVWHVKGRFPAAAAYAACGLWPCFLLLLMLPERAYAYDQEVAGSLGGAIVVMLTILTLSPHYKLWLARGLWWIQYFIARTEAVLHVYIPSFNVRGPRDSVIVLAVLVCPDLVFDITKYLLAILGPLHILQASLLRIPYFVRAQALVKICSLLRGVVYGKYFQMVVLKSRGLTGTYIYDHLTPMSDWPPYGLRDLAVALEPVVFTPMEKKVIVWGADTAACGDIIRGLPVSARLGNEILLGPADTETSKGWRLLAPITAYAQQTRGLFSTIVTSLTGRDTNENCGEVQVLSTATQSFLGTAVNGVMWTVYHGAGAKTISGPKGPVNQMYTNVDQDLVGWPAPPGVRSLAPCTCGSADLYLVTRHADVIPVRRRGDTRGALLSPRPISILKGSSGGPLLCPMGHRAGIFRAAVCTRGVAKAVDFVPVESLETTMRSPVFTDNSTPPAVPQTYQVAHLHAPTGSGKSTKVPAAHAAQGYKVLVLNPSVAATLGFGVYMSKAYGIDPNIRSGVRTITTGAPITYSTYGKFLADGGCSGGAYDIIICDECYSTDSTTILGIGTVLDQAETAGVRLTVLATATPPGSVTTPHSNIEEVALPTTGEIPFYGKAIPLELIKGGRHLIFCHSKKKCDELARQLTSLGLNAVAYYRGLDVSVIPTSGDVVVCATDALMTGFTGDFDSVIDCNTSVIQTVDFSLDPTFSIEITTVPQDAVSRSQRRGRTGRGRLGTYRYVTPGERPSGMFDTAELCECYDAGCAWYELTPAETTTRLKAYFDTPGLPVCQDHLEFWESVFTGLTHIDGHFLSQTKQSGENFPYLVAYQATVSAKVWLAPPSWDTMWKCLIRLKPTLHGPTPLLYRLGSVQNEVVLTHPITKYIMACMSADLEVVTSTWVLVGGVLAALAAYCLSVGSVVIVGRVVLSGQPAVIPDREVLYQQFDEMEECSKHLPLVEHGLQLAEQFKQKALGLLNFAGKQAQEATPVIQSNFAKLEQFWANDMWNFISGIQYLAGLSTLPGNPAIASLMSFTAAVTSPLTTQQTLLFNILGGWVASQIRDSDASTAFVVSGLAGAAVGSVGLGKILVDILPGYGAGVRGAVVTFKIMSGEMPSTEDLVNLLPAILSPGALVVEVVCPAILRRHVGPGEGAVQWMNRLIAFASRGNHVSPTHYVPESDAARRVTTILSSLTVTSLLRRLHKWINEDCSTPCAESWLWEVWDWVLHVLSDFKTCLKAKFVPLMPGIPLLSWPRGYKGEWRGDGVMHTTCPCGADLAGHIKNGSMRITGPKTCSNTWHGTFPINAYTTGPGVPIPAPNYKFALWRVSAEDYVEVRRVGDFHYVTGVTQDNIKFPCQVPAPELFTEVDGIRIHRHAPKCKPLLRDEVSFSVGLNSFVVGSQLPCEPEPDVAVLTSMLTDPSHITAESARRRLARGSRPSLASSSASQLSPRLLQATCTAPHDSPGTDLLEANLLWGSTATRVETDEKVIILDSFESCVAEQNDDREVSVAAEILRPTKKFPPALPIWARPDYNPPLTETWKQQDYQAPTVHGCALPPAKQPPVPSPRRKRTVQLTESVVSTALAELAAKTFGQSEPSSDRDTDLTTPTETTDSGPIVVDDASDDGSYSSMPPLEGEPGDPDLTSDSWSTVSGSEDVVCCSMSYSWTGALVTPCAAEESKLPISPLSNSLLRHHNMVYATTTRSAVTRQKKVTFDRLQVVDSTYNEVLKEIKARASRVKPRLLTTEEACDLTPPHSARSKFGYGKKDVRSHSRKAINHISSVWKDLLDDNNTPIPTTIMAKNEVFAVNPAKGGRKPARLIVYPDLGSRVCEKRALHDVIKKTALAVMGAAYGFQYSPAQRVEFLLTAWKSKNDPMGFSYDTRCFDSTVTEKDIRVEEEVYQCCDLEPEARKVITALTDRLYVGGPMHNSKGDLCGYRRCRATGVYTTSFGNTLTCYLKATAAIRAAALRDCTMLVCGDDLVVIAESDGVEEDNRALRAFTEAMTRYSAPPGDAPQPAYDLELITSCSSNVSVAHDVTGKKVYYLTRDPETPLARAVWETVRHTPVNSWLGNIIVYAPTIWVRMILMTHFFSILQSQEALEKALDFDMYGVTYSITPLDLPAIIQRLHGLSAFTLHGYSPHELNRVAGALRKLGVPPLRAWRHRARAVRAKLIAQGGRAKICGIYLFNWAVKTKLKLTPLPAAAKLDLSGWFTVGAGGGDIYHSMSHARPRYLLLCLLILTVGVGIFLLPAR

SEQ ID NO: 1709 - protein, 3010 aa, Artificial
  HCV
MSTNPKPQRKTKRNTNRRPQDVKFPGGGQIVGGVYLLPRRGPRLGVRATRKTSERSQPRGRRQPIPKARRPEGRAWAQPGYPWPLYGNEGMGWAGWLLSPRGSRPSWGPNDPRRRSRNLGKVIDTLTCGFADLMGYIPLVGAPLGGAARALAHGVRALEDGVNYATGNLPGCSFSIFLLALLSCLTIPASAYEVRNASGVYHVTNDCSNSSIVYEAADMIMHNPGCVPCVRENNSSRCWVALTPTLAARNASVPTTTIRRHVDLLVGAAALCSAMYVGDLCGSVFLVSQLFTFSPRRHETVQDCNCSIYPGHITGHRMAWDMMMNWSPTTALVVSQLLRIPQAVMDMVAGAHWGVLAGLAYYSMVGNWAKVLIVLLLFAGVDGNTYVTGGAAARGASGITSLFSRGPSQKIQLVNTNGSWHINRTALNCNDSFNTGFLAALFYAHRFNSSGCPERMASCRSIDKFDQGWGPITYYQGDSPDQRPYCWHYPPRPCGIVPASEVCGPVYCFTPSPVVVGTTDRLGVPTYNWGENETDVLLLNNTRPPQGNWFGCTWMNTTGFTKTCGGPPCNIGGAGNNTLTCPTDCFRKHPEATYTKCGSGPWLTPRCLVDYPYRLWHYPCTVNFTIFKVRMYVGGVEHRLDAACNWTRGERCALEDRDRSELSPLLLSTTEWQILPCSFTTLPALSTGLIHLHRNIVDVQYLYGIGSAVVSFAIKWEYVLLLFLLLADARVCACLWMMLLIAQAEAALENLVVLNAASVAGVHGILSFLVFFCAAWYIKGRLVPGAAYAFYGVWPLLLLLLALPPRAYAMAREMAASCGGAVFVGLALLTLSPYYKVFLARLIWWLQYFITRAEAHLQVWIPPLNVRGGRDAIILLTCAAHPELIFDITKLLLAIFGPIMVLQAGITKMPYFVRAQGLIRACMLVRKVAGGHYVQMAFMKLAALTGTYVYDHLTPLRDWAHTGLRDLAVAVEPVVFSDMETKIITWGADTAACGDIILGLPVSARRGKEILLGPADSLEGQGWRLLAPITAYSQQTRGLLGCIITSLTGRDKNQVEGEVQVVSTATQSFLATCVNGVCWTVYHGAGSKTLAGPKGPITQMYTNVDQDLVGWPAPSGARSLTPCTCGSSDLYLVTRYADVIPVRRRGDSRGSLLSPRPVSYLKGSSGGPLLCPSGHAAGIFRAAVCTRGVAKAVDFVPVESMETTMRSPVFTDNSSPPAVPQTFQVAHLHAPTGSGKSTKVPAAYAAQGYKVLVLNPSVAATLGFGAYMSKAHGIDPNTRTGVRTITTGAPITYSTYGKFLADGGCSGGAYDIIICDECHSTDSTTILGIGTVLDQAETAGARLVVLATATPPGSVTVPHSNIEEVALSTTGEIPFYGKAIPIETIKGGRHLIFCHSKKKCDELAAKLSALGLNAVAYYRGLDVSVIPTSGDVVVVATDALMTGFTGDFDSVIDCNTCVTQTVDFSLDPTFTIETTTVPQDAVSRSQRRGRTGRGRRGIYRFVTPGERPSGMFDSSVLCECYDAGCAWYELTPAETSVRLRAYLNTPGLPVCQDHLEFWESVFTGLTHIDAHFLSQTKQAGDNFPYLVAYQATVCARAQAPPPSWDQMWKCLIRLKPTLHGPTPLLYRLGAVQNEVTLTHPITKYIMACMSADLEVVTSTWVLVGGVLAALAAYCLTTGSVVIVGRIVLSGRPAVIPDREVLYQEFDEMEECGSHLPYIEQGMQLAEQFKQKALGLLQIATKQAEAAAPVVESKWRALETFWAKHMWNFISGVQYLAGLSTLPGNPAIASLMAFTASVTSPLTTQSTLLFNILGGWVAAQLAPPSAASAFVGAGIAGAAVGSIGLGKVLVDILAGYGAGVAGALVAFKIMSGETPSAEDLVNLLPAILSPGALVVGVVCAAIQRRHVGPGEGAVQWMNRLIAFASRGNHVSPTHYVPESDAAARVTQILSSLTITQLLKRLHQWINEDCSTPCSGSWLRDIWDWICSVLTDFKTWLQSKLLPRLPGVPFFSCQRGYKGVWRGDGIMQTTCPCGAQITGHVKNGSMRIVGPKTCSNTWHGTFPINAYTTGPCTPSPAPNYSRALWRVAAEEYVEVTRVGDFHYITGMTTDNIKCPCQVPAPEFFTEVDGVRLHRYAPACKPVLREEVDFQVGLNQYPVGSQLPCEPEPDVAVLTSMLTDPSHITAEAAKRRLARGSPPSLASSSASQLSAPSLKATCTTHHDSPDADLIEANLLWRQEMGGNITRVESENKVVILDSFEPLRAEEDEREVSVAAEILRKTRRFPPAMPVWARPDYNPPLLESWKDPDYVPPVVHGCPLPPTKAPPIPPPRRKRTVVLTESTVSSALAELATKTFGSSGSSAVDSGTATAPPDQTSNDGDRESDAESYSSMPPLEGEPGDPDLSDGSWSTVSEEASGDVVCCSMSYTWTGALITPCAAEESKLPINPLSNSLLRHHNMVYATTSRSASLRQKKVTFDRLQVLDDHYRDVLKEMKAKASTVKAKLLSIEEACKLTPPHSAKSKFGYGAKDVRNLSSKAVNHIRSVWKDLLEDTETPIDTTIMAKNEVFCVQPEKGGRKPARLIVFPDLGVRVCEKMALYDVVSTLPQAVMGSSYGFQYSPGQRVEFLVNTWKSKKCPMGFSYDTRCFDSTVTENDIRIEESIYQCCDLAPEAKQAIKSLTERLYIGGPLTNSKGQNCGYRRCRASGVLTTSCGNTLTCYLKASAACRAAKLQDCTMLVNGDDLVVICESAGTQEDAASLRVFTEAMTRYSAPPGDPPQPEYDLELITSCSSNVSVAHDASGKRVYYLTRDPTTPLARAAWETARHTPVNSWLGNIIMYAPTLWARMILMTHFFSILLAQEQLEKALECQIYGACYSIEPLDLPQIIERLHGLSAFSLHSYSPGEINRVASCLRKLGVPPLRVWRHRARSVRAKLLSQGGRAATCGKYLFNWAVRTKLKLTPIPAASRLDLSGWFVAGYGGGDIYHSLSRARPRWFMLCLLLLSVGVGIYLLPNR

SEQ ID NO: 1710 - protein, 3011 aa, Artificial
  HCV
MSTNPKPQRKTKRNTNRRPQDVKFPGGGQIVGGVYLLPRRGPRVGVRATRKTSERSQPRGRRQPIPKARRPEGRSWAQPGYPWPLYGNEGCGWAGWLLSPRGSRPSWGPSDPRRRSRNLGKVIDTLTCGFADLMGYIPLVGAPLGGAARALAHGVRVLEDGVNYATGNLPGCSFSIFLLALLSCLTVPASAVGVRNSSGVYHVTNDCPNASVVYETENLIMHLPGCVPYVREGNASRCWVSLSPTVAARDSRVPVSEVRRRVDSIVGAAAFCSAMYVGDLCGSIFLVGQIFTFSPRHHWTTQDCNCSIYPGHVTGHRMAWDMMMNWSPTGALVVAQLLRIPQAIVDMIAGAHWGVLAGLAYYSMVGNWAKVVVVLLLFAGVDAETRVTGGAAGHTAFGFASFLAPGAKQKIQLINTNGSWHINRTALNCNESLDTGWLAGLLYYHKFNSSGCPERMASCQPLTAFDQGWGPITHEGNASDDQRPYCWHYALRPCGIVPAKKVCGPVYCFTPSPVVVGTTDRAGVPTYRWGANETDVLLLNNSRPPMGNWFGCTWMNSSGFTKTCGAPACNIGGSGNNTLLCPTDCFRKHPDATYSRCGSGPWLTPRCLVDYPYRLWHYPCTVNYTIFKIRMFVGGVEHRLDAACNWTRGERCDLDDRDRAELSPLLLSTTQWQVLPCSFTTLPALSTGLIHLHQNIVDVQYLYGLSSAVTSWVIKWEYVVLLFLLLADARICACLWMMLLISQVEAALENLIVLNAASLVGTHGIVPFFIFFCAAWYLKGKWAPGLAYSVYGMWPLLLLLLALPQRAYALDQELAASCGATVFICLAVLTLSPYYKQYMARGIWWLQYMLTRAEALLQVWVPPLNARGGRDGVVLLTCVLHPHLLFEITKIMLAILGPLWILQASLLKVPYFVRAHGLIRLCMLVRKTAGGQYVQMALLKLGAFAGTYIYNHLSPLQDWAHSGLRDLAVATEPVIFSRMEIKTITWGADTAACGDIINGLPVSARRGREVLLGPADALTDKGWRLLAPITAYAQQTRGLLGCIITSLTGRDKNQVEGEVQIVSTATQTFLATCVNGVCWTVYHGAGSRTIASASGPVIQMYTNVDQDLVGWPAPQGARSLTPCTCGASDLYLVTRHADVIPVRRRGDNRGSLLSPRPISYLKGSSGGPLLCPMGHAVGIFRAAVCTRGVAKAVDFVPVESLETTMRSPVFTDNSSPPTVPQSYQVAHLHAPTGSGKSTKVPAAYAAQGYKVLVLNPSVAATLGFGAYMSKAHGIDPNVRTGVRTITTGSPITHSTYGKFLADGGCSGGAYDIIICDECHSVDATSILGIGTVLDQAETAGVRLTILATATPPGSVTVPHSNIEEVALSTEGEIPFYGKAIPLNYIKGGRHLIFCHSKKKCDELAAKLVGLGVNAVAFYRGLDVSVIPTTGDVVVVATDALMTGYTGDFDSVIDCNTCVVQTVDFSLDPTFSIETSTVPQDAVSRSQRRGRTGRGKHGIYRYVSPGERPSGMFDSVVLCECYDAGCAWYELTPAETTVRLRAYLNTPGLPVCQDHLEFWESVFTGLTHIDAHFLSQTKQSGENFPYLVAYQATVCARAKAPPPSWDQMWKCLIRLKPTLTGATPLLYRLGGVQNEITLTHPITKYIMACMSADLEVVTSTWVLVGGVLAALAAYCLSTGSVVIVGRIILSGKPAVIPDREVLYREFDEMEECAAHIPYLEQGMHLAEQFKQKALGLLQTASKQAETITPAVHTNWQKLESFWAKHMWNFVSGIQYLAGLSTLPGNPAIASLMSFTAAVTSPLTTQQTLLFNILGGWVAAQLAAPAAATAFVGAGITGAVIGSVGLGKVLVDILAGYGAGVAGALVAFKIMSGEAPTAEDLVNLLPAILSPGALVVGVVCAAILRRHVGPGEGAVQWMNRLIAFASRGNHVSPTHYVPESDASVRVTHILTSLTVTQLLKRLHVWISSDCTAPCAGSWLKDVWDWICEVLSDFKSWLKAKLMPQLPGIPFVSCQRGYRGVWRGEGIMHARCPCGADITGHVKNGSMRIVGPKTCSNTWRGSFPINAHTTGPCTPSPAPNYTFALWRVSAEEYVEVRRLGDFHYITGVTTDKIKCPCQVPSPEFFTEVDGVRLHRYAPPCKPLLRDEVTFSIGLNEYLVGSQLPCEPEPDVAVLTSMLTDPSHITAETAARRLNRGSPPSLASSSASQLSAPSLKATCTTHHDSPDADLITANLLWRQEMGGNITRVESENKIVILDSFDPLVAEEDDREISVPAEILLKSKKFPPAMPIWARPDYNPPLVEPWKRPDYEPPLVHGCPLPPPKPTPVPPPRRKRTVVLDESTVSSALAELATKTFGSSTTSGVTSGEAAESSPAPSCDGELDSEAESYSSMPPLEGEPGDPDLSDGSWSTVSSDGGTEDVVCCSMSYSWTGALITPCAAEETKLPINALSNSLLRHHNLVYSTTSRSAGQRQKKVTFDRLQVLDDHYRDVLKEAKAKASTVKAKLLSVEEACSLTPPHSARSKFGYGAKDVRSHSSKAIRHINSVWQDLLEDNTTPIDTTIMAKNEVFCVKPEKGGRKPARLIVYPDLGVRVCEKRALYDVVKQLPIAVMGTSYGFQYSPAQRVDFLLNAWKSKKNPMGFSYDTRCFDSTVTEADIRTEEDLYQSCDLVPEARAAIRSLTERLYIGGPLTNSKGQNCGYRRCRASGVLTTSCGNTITCYLKASAACRAAKLRDCTMLVCGDDLVVICESAGVQEDAANLRAFTEAMTRYSAPPGDPPQPEYDLELITSCSSNVSVAHDGAGKRVYYLTRDPETPLARAAWETARHTPVNSWLGNIIMFAPTLWVRMVLMTHFFSILIAQEHLEKALDCEIYGAVHSVQPLDLPEIIQRLHGLSAFSLHSYSPGEINRVAACLRKLGVPPLRAWRHRARSVRATLLSQGGRAAICGKYLFNWAVKTKLKLTPLPSASQLDLSNWFTGGYSGGDIYHSVSHVRPRWFFWCLLLLSVGVGIYLLPNR

SEQ ID NO: 1711 - protein, 3010 aa, Artificial
  HCV
MSTNPKPQRKTKRNTNRRPQDIKFPGGGQIVGGVYLLPRRGPRLGVRATRKTSERSQPRGRRQPIPKARRPEGRAWAQPGYPWPLYGNEGLGWAGWLLSPRGSRPSWGPTDPRRKSRNLGKVIDTLTCGFADLMGYIPLVGAPLGGVARALAHGVRVLEDGVNYATGNLPGCSFSIFLLALLSCLTTPVSAYEVRNASGMYHVTNDCSNSSIVYEAADMIMHTPGCVPCVREDNSSRCWVALTPTLAARNASVPTTTLRRHVDLLVGVAAFCSAMYVGDLCGSVFLVSQLFTFSPRRHETVQDCNCSIYPGRVSGHRMAWDMMMNWSPTTALVVSQLLRIPQAVVDMVTGSHWGILAGLAYYSMVGNWAKVLIAMLLFAGVDGTTHVTGGAQGRAASSLTSLFSPGPVQHLQLINTNGSWHINRTALSCNDSLNTGFVAALFYKYRFNASGCPERLATCRPIDTFAQGWGPITYTEPHDLDQRPYCWHYAPQPCGIVPTLQVCGPVYCFTPSPVAVGTTDRFGAPTYRWGANETDVLLLNNAGPPQGNWFGCTWMNGTGFTKTCGGPPCNIGGVGNNTLTCPTDCFRKHPGATYTKCGSGPWLTPRCLVDYPYRLWHYPCTVNFTIFKVRMYVGGAEHRLDAACNWTRGERCDLEDRDRSELSPLLLSTTEWQVLPCSFTTLPALSTGLIHLHQNIVDIQYLYGIGSAVVSFAIKWEYIVLLFLLLADARVCACLWMMLLVAQAEAALENLVVLNAASVAGAHGILSFIVFFCAAWYIKGRLVPGAAYALYGVWPLLLLLLALPPRAYAMDREMAASCGGAVFVGLVLLTLSPHYKVFLARFIWWLQYLITRTEAHLQVWVPPLNVRGGRDAIILLTCVVHPELIFDITKYLLAIFGPLMVLQAGITRVPYFVRAQGLIRACMLARKVVGGHYVQMVFMKLAALAGTYVYDHLTPLRDWAHTGLRDLAVAVEPVVFSDMETKVITWGADTAACGDIILACPASARRGKEILLGPADSLEGQGWRLLAPITAYSQQTRGLLGCIITSLTGRDKNQVEGEVQVVSTATQSFLATCINGVCWTVFHGAGSKTLAGPKGPITQMYTNVDQDLVGWPAPPGARSLTPCTCGSSDLYLVTRHADVIPVRRRGDGRGSLLPPRPVSYLKGSSGGPLLCPSGHAVGILPAAVCTRGVAMAVEFIPVESMETTMRSPVFTDNPSPPAVPQTFQVAHLHAPTGSGKSTRVPAAYAAQGYKVLVLNPSVAATLGFGAYMSKAHGIDPNLRTGVRTITTGAPITYSTYGKFLADGGGSGGAYDIIMCDECHSTDSTTIYGIGTVLDQAETAGARLVVLSTATPPGSVTVPHLNIEEVALSNTGEIPFYGKAIPIEAIKGGRHLIFCHSKKKCDELAAKLSGLGLNAVAYYRGLDVSVIPTSGDVVVVATDALMTGFTGDFDSVIDCNTCVTQTVDFSLDPTFTIETTTVPQDAVSRSQRRGRTGRGRAGIYRFVTPGERPSGMFDSSVLCECYDAGCAWYELTPAETSVRLRAYLNTPGLPVCQDHLEFSEGVFTGLTHIDAHFLSQTKQAGENFPYLVAYQATVCARAQAPPPSWDEMWRCLIRLKPTLHGPTPLLYRLGAVQNEVTLTHPITKFIMTCMSADLEVVTSTWVLVGGVLAALAAYCLTTGSVVIVGRIILSGKPAIIPDREVLYQEFDEMEECASHLPYFEQGMQLAEQFKQKALGLLQTATKQAEAAAPVVESKWRALETFWAKHMWNFISGIQYLAGLSTLPGNPAIRSPMAFTASITSPLTTQHTLLFNILGGWVAAQLAPPSAASAFVGAGIAGAAVGTIGLGKVLVDILAGYGAGVAGALVAFKIMSGEMPSAEDMVNLLPAILSPGALVVGIVCAAILRRHVGPGEGAVQWMNRLIAFASRGNHVSPRHYVPESEPAARVTQILSSLTITQLLKRLHQWINEDCSTPCSSSWLREIWDWICTVLTDFKTWLQSKLLPRLPGVPFFSCQRGYKGVWRGDGIMHTTCPCGAQITGHVKNGSMRIVGPKTCSNTWYGTFPINAYTTGPCTPSPAPNYSKALWRVAAEEYVEVTRVGDFHYVTGMTTDNVKCPCQVPAPEFFTEVDGVRLHRYAPACRPLLREEVVFQVGLHQYLVGSQLPCEPEPDVAVLTSMLTDPSHITAETAKRRLARGSPPSLASSSASQLSAPSLKATCTTHHDSPDADLIEANLLWRQEMGGNITRVESENKVVILDSFDPLRAEDDEGEISVPAEILRKSRKFPPALPIWAPPDYNPPLLESWKDPDYVPPVVHGCPLPPTKAPPIPPPRRKRTVVLTESTVSSALAELATKTFGSSGSSAIDSGTATAPPDQASGDGDRESDVESFSSMPPLEGEPGDPDLSDGSWSTVSEEASEDVVCCSMSYTWTGALITPCAAEESKLPINPLSNSLLRHHNMVYATTSRSAGLRQKKVTFDRLQVLDDHYRDVLKEMKAKASTVKAKLLSVEEACKLTPPHSAKSKFGYGAKDVRSLSSRAVTHIRSVWKDLLEDTETPISTTIMAKNEVFCVQPEKGGRKPARLIVFPDLGVRVCEKMALYDVVSTLPQAVMGSSYGFQYSPKQRVEFLVNTWKSKKCPMGFSYDTRCFDSTVTENDIRVEESIYQCCDLAPEAKLAIKSLTERLYIGGPLTNSKGQNCGYRRCRASGVLTTSCGNTLTCYLKATAACRAAKLRDCTMLVNGDDLVVICESAGTQEDAASLRVFTEAMTRYSAPPGDPPQPEYDLELITSCSSNVSVAHDASGKRVYYLTRDPTTPLARAAWETARHTPVNSWLGNIIMYAPTLWARMILMTHFFSILLAQEQLEKTLDCQIYGACYSIEPLDLPQIIERLHGLSAFSLHSYSPGEINRVASCLRKLGVPPLRAWRHRARSVRAKLLSQGGRAATCGKYLFNWAVRTKLKLTPIPAASRLDLSGWFVAGYSGGDIYHSLSRARPRWFMLCLLLLSVGVGIYLLPNR

SEQ ID NO: 1712 - protein, 3011 aa, Artificial
  HCV
MSTNPKPQRKTKRNTNRRPQDVEFPGGGQIVGGVYLLPRRGPRLGVRATRKTSERSQPRGRRQPIPKARRPEGRTWAQPGYPWPLYGNEGCGWAGWLLSPRGSRPSWGPTDPRRRSRNLGKVIDTLTCGFADLMGYIPLVGAPLGGAARALAHGVRVLEDGVNYATGNLPGCSFSIFLLALLSCLTVPASAYQVRNSSGLYHVTNDCPNSSIVYEAADAILHTPGCVPCVREGNASRCWVAVTPTVATRDGKLPTTQLRRHIDLLVGSATLCSALYVGDLCGSVFLVGQLFTFSPRRHWTTQSCNCSIYPGHITGHRMAWDMMMNWSPTAALVVAQLLRIPQAIMDMIAGAHWGVLAGIAYFSMVGNWAKVLVVLLLFAGVDAETHVTGGSAGHTTAGLVGLLTPGAKQNIQLINTNGSWHINSTALNCNDSLTTGWLAGLFYRHKFNSSGCPERLASCRRLTDFAQGWGPISYANGSGLDERPYCWHYPPRPCGIVPAKSVCGPVYCFTPSPVVVGTTDRSGAPTYSWGANDTDVFVLNNTRPPLGNWFGCTWMNSTGFTKVCGAPPCVIGGVGNNTLLCPTDCFRKHPEATYSRCGSGPWITPRCMVDYPYRLWHYPCTINYTIFKVRMYVGGVEHRLEAACNWTRGERCDLEDRDRSELSPLLLSTTQWQVLPCSFTTLPALSTGLIHLHQNIVDVQYLYGVGSSIASWAIKWEYVVLLFLLLADARVCSCLWMMLLISQAEAALENLVILNAASLAGTHGLVSFLVFFCFAWYLKGRWVPGAVYAFYGMWPLLLLLLALPQRAYALDTEVAASCGGVVLVGLMALTLSPYYKRYISWCMWWLQYFLTRVEAQLHVWVPPLNVRGGRDAVILLMCVVHPTLVFDITKLLLAIFGPLWILQASLLKVPYFVRVQGLLRICALARKIAGGHYVQMAIIKLGALTGTYVYNHLTPLRDWAHNGLRDLAVAVEPVVFSRMETKLITWGADTAACGDIINGLPVSARRGQEILLGPADGMVSKGWRLLAPITAYAQQTRGLLGCIITSLTGRDKNQVEGEVQIVSTATQTFLATCINGVCWTVYHGAGTRTIASPKGPVIQMYTNVDQDLVGWPAPQGSRSLTPCTCGSSDLYLVTRHADVIPVRRRGDSRGSLLSPRPISYLKGSSGGPLLCPAGHAVGLFRAAVCTRGVTKAVDFIPVENLETTMRSPVFTDNSSPPAVPQSFQVAHLHAPTGSGKSTKVPAAYAAQGYKVLVLNPSVAATLGFGAYMSKAHGVDPNIRTGVRTITTGSPITYSTYGKFLADGGCSGGAYDIIICDECHSTDATSILGIGTVLDQAETAGARLVVLATATPPGSVTVSHPNIEEVALSTTGEIPFYGKAIPLEVIKGGRHLIFCHSKKKCDELAAKLVALGINAVAYYRGLDVSVIPTNGDVVVVSTDALMTGFTGDFDSVIDCNTCVTQTVDFSLDPTFTIETTTLPQDAVSRTQRRGRTGRGKPGIYRFVAPGERPSGMFDSSVLCECYDAGCAWYELMPAETTVRLRAYMNTPGLPVCQDHLEFWEGVFTGLTHIDAHFLSQTKQSGENFPYLVAYQATVCARAQAPPPSWDQMWKCLIRLKPTLHGPTPLLYRLGAVQNEVTLTHPITKYIMTCMSADLEVVTSTWVLVGGVLAALAAYCLSTGCVVIVGRIVLSGKPAIIPDREVLYQEFDEMEECSQHLPYIEQGMMLAEQFKQKALGLLQTASRHAEVITPAVQTNWQKLEVFWAKHMWNFISGIQYLAGLSTLPGNPAIASLMAFTAAVTSPLTTGQTLLFNILGGWVAAQLAAPGAATAFVGAGLAGAAIGSVGLGKVLVDILAGYGAGVAGALVAFKIMSGEVPSTEDLVNLLPAILSPGALVVGVVCAAILRRHVGPGEGAVQWMNRLIAFASRGNHVSPTHYVPESDAAARVTAILSSLTVTQLLRRLHQWISSECTTPCSGSWLRDIWDWICEVLSDFKTWLKAKLMPQLPGIPFVSCQRGYRGVWRGDGIMHTRCHCGAEITGHVKNGTMRIVGPRTCRNMWSGTFPINAYTTGPCTPLPAPNYKFALWRVSAEEYVEIRRVGDFHYVSGMTTDNLKCPCQIPSPEFFTELDGVRLHRFAPPCKPLLREEVSFRVGLHEYPVGSQLPCEPEPDVAVLTSMLTDPSHITAEAAGRRLARGSPPSMASSSASQLSAPSLKATCTANHDSPDAELIEANLLWRQEMGGNITRVESENKVVILDSFDPLVAEEDEREVSVPAEILRKSRRFARALPVWARPDYNPPLVETWKKPDYEPPVVHGCPLPPPRSPPVPPPRKKRTVVLTESTLPTALAELATKSFGSSSTSGITGDNMTTSSEPAPSGCPPDSDVESYSSMPPLEGEPGDPDFSDGSWSTVSSGADTEDVVCCSMSYTWTGALVTPCAAEEQKLPINALSNSLLRHHNLVYSTTSRSACQRQKKVTFDRLQVLDSHYQDVLKEVKAAASKVKANLLSVEEACSLTPPHSAKSKFGYGAKDVRCHARKAVAHINSVWKDLLEDSVTPIDTIIMAKNEVFCVQPEKGGRKPARLIVFPDLGVRVCEKMALYDVVSKLPLAVMGSSYGFQYSPGQRVEFLVQAWKSKKTPMGFPYDTRCFDSTVTESDIRTEEAIYQCCDLDPQARVAIKSLTERLYVGGPLTNSRGENCGYRRCRASGVLTTSCGNTLTCYIKARAARRAAGLQDCTMLVCGDDLVVICESAGVQEDAASLRAFTEAMTRYSAPPGDPPQPEYDLELITSCSSNVSVAHDGAGKRVYYLTRDPTTPLARAAWETARHTPVNSWLGNIIMFAPTLWARMILMTHFFSVLIARDQLEQALNCEIYAACYSIEPLDLPPIIQRLHGLSAFLLHSYSPGEVNRVAACLRKLGVPPLRAWRHRARSVRARLLSRGGRAAICGKYLFNWAVRTKLKLTPIAAAGRLDLSGWFTAGYSGGDIYHSVSHARPRWFWFCLLLLAAGVGIYLLPNR

SEQ ID NO: 1713 - protein, 3011 aa, Artificial
  HCV
MSTIPKPQRKTKRNTNRRPQDVKFPGGGQIVGGVYLLPRRGPRLGVRATRKTSERSQPRGRRQPIPKVRRPEGRTWAQPGYPWPLYGNEGCGWAGWLLSPRGSRPSWGPTDPRRRSRNLGKVIDTLTCGFADLMGYIPLVGAPLGGAARALAHGVRVLEDGVNYATGNLPGCSFSIFLLALLSCLTVPASAYQVRNSTGLYHVTNDCPNSSIVYEAHDAILHTPGCVPCVREGNVSRCWVAMTPTVATRDGKLPATQLRRHIDLLVGSATLCSALYVGDLCGSVFLIGQLFTFSPRRHWTTQGCNCSIYPGHITGHRMAWDMMMNWSPTAALVMAQLLRIPQAILDMIAGAHWGVLAGIAYFSMVGNWAKVLVVLLLFAGVDAETIVSGGQAARAMSGLVSLFTPGAKQNIQLINTNGSWHINSTALNCNESLNTGWLAGLIYQHKFNSSGCPERLASCRRLTDFDQGWGPISHANGSGPDQRPYCWHYPPKPCGIVPAKSVCGPVYCFTPSPVVVGTTDRSGAPTYNWGANDTDVFVLNNTRPPLGNWFGCTWMNSTGFTKVCGAPPCVIGGGGNNTLHCPTDCFRKHPEATYSRCGSGPWITPRCLVDYPYRLWHYPCTINYTIFKVRMYVGGVEHRLDAACNWTRGERCDLEDRDRSELSPLLLSTTQWQVLPCSFTTLPALSTGLIHLHQNIVDVQYLYGVGSSIASWAIKWEYVVLLFLLLADARVCSCLWMMLLISQAEAALENLVILNAASLAGTRGLVSFLVFFCFAWYLKGRWVPGAAYALYGMWPLLLLLLALPQRAYALDTEVAASCGGVVLVGLMALTLSPYYKRCISWCLWWLQYFLTRVEAQLHVWVPPLNVRGGRDAVILLMCVVHPTLVFDITKLLLAVLGPLWILQASLLKVPYFVRVQGLLRICALARKMVGGHYVQMAIIKLGALTGTYVYNHLTPLRDWAHNGLRDLAVAVEPVVFSQMETKLITWGADTAACGDIINGLPVSARKGREILLGPADGMVSKGWRLLAPITAYAQQTRGLLGCIITSLTGRDKNQVEGEVQIVSTAAQTFLATCINGVCWTVYHGAGTRTIASPKGPVIQMYTNVDQDLVGWPAPQGARSLTPCTCGSSDLYLVTRHADVIPVRRRGDSRGSLLSPRPISYLKGSSGGPLLCPAGHVVGIFRAAVCTRGVAKAVDFIPVESLETTMRSPVFTDNSSPPAVPQSFQVAHLHAPTGSGKSTKVPAAYAAQGYKVLVLNPSVAATLGFGAYMSKAHGIDPNIRTGVRTITTGSPITYSTYGKFLADGGCSGGAYDIIICDECHSTDATSVLGIGTVLDQAETAGARLVVLATATPPGSITVPHANIEEVALSTTGEIPFYGKAIPLEAIKGGRHLIFCHSKKKCDELAAKLVALGVNAVAYYRGLDVSVIPTSGDVVVVATDALMTGYTGDFDSVIDCNTCVTQTVDFSLDPTFTIETTTLPQDAVSRTQRRGRTGRGKPGIYRFVAPGERPSGMFDSSILCECYDTGCAWYELTPAETTVRLRAYMNTPGLPVCQDHLEFWEGVFTGLTHIDAHFLSQTKQGGENFPYLVAYQATVCARAQAPPPSWDQMWKCLIRLKPTLHGPTPLLYRLGAVQGEVTLTHPVTKYIMTCMSADLEVVTSTWVLVGGVLAALAAYCLSTGCVVIVGRIVLSGRPAIIPDREVLYREFDEMEECSQHLPYIEQGMMLAEQFKQKALGLLQTASRQAEVIAPTVQTNWQKLEAFWAKHMWNFISGIQYLAGLSTLPGNPAIASLMAFTAAVTSPLTTSQTLLFNILGGWVAAQLAAPGAATAFVGSGLAGAAVGSVGLGRVLVDILAGYGAGVAGALVAFKIMSGELPSTEDLVNLLPAILSPGALVVGVVCAAILRRHVGPGEGAVQWMNRLIAFASRGNHVSPTHYVPESDAAARVTAILSSLTVTQLLRRLHQWLSSESTTPCSGSWLRDIWDWICEVLSDFKTWLKTKLMPHLPGIPFVSCQHGYKGVWRGDGIMHTRCHCGAEITGHVKNGTMRIVGPKTCRNMWSGTFPINAYTTGPCTPLPAPNYTFALWRVSAEEYVEIRRVGDFHYVTGMTTDNLKCPCQVPSPEFFTELDGVRLHRFAPPCKPLLREEVSFRVGLHDYPVGSQLPCEPEPDVAVLTSMLTDPSHITAAAAGRRLARGSPPSEASSSASQLSAPSLKATCTINHDSPDAELIEANLLWRQEMGGNITRVESENKVVILDSFDPLVAEEDEREISVPAEILRKSRRFTQALPIWARPDYNPPLIETWKKPNYEPPVVHGCPLPPPQSPPVPPPRKKRTVVLTESTLSTALAELAAKSFGSSSTSGITGDNTTTSSEPAPSGCSPDSDAESYSSMPPLEGEPGDPDLSDGSWSTVSSEAGTEDVVCCSMSYTWTGALITPCAAEEQKLPINALSNSLLRHHNLVYSTTSRSACQRQKKVTFDRLQVLDSHYQDVLKEVKAAASKVKANLLSVEEACSLTPPHSAKSKFGYGAKDVRCHARKAVNHINSVWKDLLEDSVTPIQTTIMAKNEVFCVQPEKGGRKPARLIVFPDLGVRVCEKMALYDVVSKLPPAVMGSSYGFQYSPGQRVEFLVQAWKSKRTPMGFSYDTRCFDSTVTESDIRTEEAIYQCCDLDPQARVAIRSLTERLYVGGPLTNSRGENCGYRRCRASGVLTTSCGNTLTCYIKARAACRAAGLQDCTMLVCGDDLVVICESAGVQEDAASLRAFTEAMTRYSAPPGDPPQPEYDLELITSCSSNVSVAHDGTGKRVYYLTRDPTTPLARAAWETARHTPVNSWLGNIIMFAPTLWARMILMTHFFSVLIARDQLEQALDCEIYGACYSIEPLDLPPIIQRLHGLSAFSLHSYSPGEINRVAACLRKLGVPPLRAWRHRARSVRARLLSRGGRAAICGKYLFNWAVRTKLKLTPIAAAGRLDLSGWFTAGYSGGDIYHSVSHARPRWFWFCLLLLAAGVGIYLLPNR

SEQ ID NO: 1714 - protein, 3010 aa, Artificial
  HCV
MSTNPKPQRKTKRNTNRRPQDVKFPGGGQIVGGVYLLPRRGPRLGVRATRKTSERSQPRGWRQPIPKARRPEGRAWAQPGYPWPLYGNEGLGWAGWLLSPRGSRPSWGPTDPRRRSRNLGKVIDTLTCGFADLMGYIPLVGAPLGGAARALAHGVRVLEDGVNYATGNLPGCSFSIFLLALLSCLTIPASAYEVRNVSGIYHVTNDCSNSSIVYEAADMIMHTPGCVPCVREDNSSRCWVALTPTLAARNASVPTTTIRRHVDLLVGAAAFCSAMYVGDLCGSVFLVSQLFTFSPRRHETVQDCNCSIYPGHLSGHRMAWDMMMNWSPTTALVVSQLLRIPQAVVDMVAGAHWGVLAGLAYYSMVGNWAKVLIVALLFAGVDGETYTSGGAASHTTSTLASLFSPGASQRIQLVNTNGSWHINRTALNCNDSLHTGFLAALFYTHRFNSSGCPERMASCRPIDWFAQGWGPITYTEPDSPDQRPYCWHYAPRPCGIVPASQVCGPVYCFTPSPVVVGTTDRSGVPTYSWGENETDVMLLNNTRPPQGNWFGCTWMNSTGFTKTCGGPPCNIGGVGNHTLTCPTDCFRKHPEATYTKCGSGPWLTPRCLVDYPYRLWHYPCTFNFSIFKVRMYVGGVEHRLNAACNWTRGERCNLEDRDRSELSPLLLSTTEWQILPCAFTTLPALSTGLIHLHQNIVDVQYLYGVGSAFVSFAIKWEYILLLFLLLADARVCACLWMMLLIAQAEAALENLVVLNAASVAGAHGILSFLVFFCAAWYIKGRLAPGAAYAFYGVWPLLLLLLALPPRAYAMDREMAASCGGAVLVGLVFLTLSPYYKVFLTRLIWWLQYFITRAEAHMQVWVPPLNVRGGRDAIILLTCAVHPELIFDITKLLLAILGPLMVLQAGITRVPYFVRAQGLIRACMLVRKVAGGHYVQMAFMKLGALTGTYVYNHLTPLRDWAHAGLRDLAVAVEPVVFSDMETKVITWGADTAACGDIILGLPVSARRGKEIFLGPADSLEGQGWRLLAPITAYSQQTRGVLGCIITSLTGRDKNQVEGEVQVVSTATQSFLATCINGVCWTVYHGAGSKTLAGPKGPITQMYTNVDLDLVGWQAPPGARSMTPCTCGSSDLYLVTRHADVIPVRRRGDSRGSLLSPRPVSYLKGSSGGPLLCPSGHVVGVFRAAVCTRGVAKAVDFIPVESMETTMRSPVFTDNSSPPAVPQTFQVAHLHAPTGSGKSTKVPAAYAAQGYKVLVLNPSVAATLGFGAYMPKAHGIDPNIRTGVRTITTGGPITYSTYGKFLADGGCSGGAYDIIICDECHSTDSTTILGIGTVLDQAETAGARLVVLATATPPGSVTVPHPNIEEIGLSNNGEIPFYGKAIPIEAIKGGRHLIFCHSKKKCDELAAKLTGLGLNAVAYYRGLDVSVIPPIGDVAVVATDALMTGFTGDFDSVIDCNTCVTQTVDFSLDPTFTIETTTVPQDAVSRSQRRGRTGRGRSGIYRFVTPGERPSGMFDSSVLCECYDAGCAWYELTPAETSVRLRAYLNTPGLPVCQDHLEFWESVFTGLSHIDAHFLSQTKQAGDNFPYLVAYQATVCARAQAPPPSWDQMWKCLIRLKPTLHGPTPLLYRLGAVQNEVTLTHPITKYIMACMSADLEVVTSTWVLVGGVLAALAAYCLTTGSVVIVGRIILSGKPAVVPDREVLYQEFDEMEECASQLPYIEQGMQLAEQFKQKALGLLQTATKQAEAAAPVVESKWRALETFWAKHMWNFISGIQYLAGLSTLPGNPAIASLMAFTASITSPLTTQNTLLFNILGGWVAAQLAPPSAASAFVGAGIAGAAVGSIGLGKVLVDILAGYGAGVAGALVAFKVMSGEVPSTEDLVNLLPAILSPGALVVGVVCAAILRRHVGPGEGAVQWMNRLIAFASRGNHVSPTHYVPESDAAARVTQILSSLTITQLLKRLHQWINEDCSTPCSGSWLRDVWDWICTVLTDFKTWLQSKLLPRLPGVPFLSCQRGYKGVWRGDGIMQTTCPCGAQIAGHVKNGSMRIVGPRTCSNTWHGTFPINAYTTGPCTPSPAPNYSRALWRVAAEEYVEVTRVGDFHYVTGMTTDNVKCPCQVPAPEFFTEVDGVRLHRYAPACKPLLREDVAFQVGLNQYLVGSQLPCEPEPDVTVLTSMLTDPSHITAETAKRRLARGSPPSLASSSASQLSAPSLKATCTTHHDSPDADLIEANLLWRQEMGGNITRVESENKVVILDSFEPLHAEGDEREISVAAEILRKSRKFPSALPIWARPDYNPPLLESWKDPDYVPPVVHGCPLPPTKAPPIPPPRRKRTVVLTESNVSSALAELATKTFSSSGSSAVDSGTATALPDQASDDGDKGSDVESYSSMPPLEGEPGDPDLSDGSWSTVSEEASEDVVCCSMSYTWTGALITPCAAEESKLPINPLSNSLLRHHNMVYATTSRSASLRQKKVTFDRLQVLDDHYRDVLKEMKAKASTVKAKLLSIEEACKLTPPHSAKSKFGYGAKDVRNLSSRAVNHIRSVWEDLLEDTETPIDTTIMAKNEVFCVQPEKGGRKPARLIVFPDLGVRVCEKMALYDVVSTLPQAVMGSSYGFQYSPKQRVEFLVNTWKSKKCPMGFSYDTRCFDSTVTESDIRVEESIYQCCDLAPEARQAIRSLTERLYIGGPLTNSKGQNCGYRRCRASGVLTTSCGNTLTCYLKATAACRAAKLQDCTMLVNGDDLVVICESAGTQEDAAALRVFTEAMTRYSAPPGDPPQPEYDLELITSCSSNVSVAHDASGKRVYYLTRDPTIPLARAAWETARHTPVNSWLGNIIMYAPALWARMILMTHFFSILLAQEQLEQALDCQIYGACYSIEPLDLPQIIERLHGLSAFSLHSYSPGEINRVASCLRKLGVPPLRVWRHRARSVRAKLLSQGGRAATCGRYLFNWAVRTKLKLTPIPAASQLDLSGWFVAGYSGGDIYHSLSRARPRWFLLCLLLLSVGVGIYLLPNR

SEQ ID NO: 1715 - protein, 3033 aa, Artificial
  HCV
MSTNPKPQRKTKRNTNRRPQDVKFPGGGQIVGGVYLLPRRGPRLGVRATRKTSERSQPRGRRQPIPKDRRSTGKSWGKPGYPWPLYGNEGCGWAGWLLSPRGSRPTWGPTDPRHRSRNLGRVIDTITCGFADLMGYIPVVGAPVGGVARALAHGVRVLEDGINYATGNLPGCSFSIFLLALLSCVTVPVSAVEVRNISSSYYATNDCSNNSITWQLTDAVLHLPGCVPCENDNGTLHCWIQVTPNVAVKHRGALTRSLRTHVDMIVMAATACSALYVGDVCGAVMILSQAFMVSPQRHNFTQECNCSIYQGHITGHRMAWDMMLSWSPTLTMILAYAARVPELVLEIIFGGHWGVVFGLAYFSMQGAWAKVIAILLLVAGVDATTYSSGQEAGRTVAGFAGLFTTGAKQNLYLINTNGSWHINRTALNCNDSLQTGFLASLFYTHKFNSSGCPERLSSCRGLDDFRIGWGTLEYETNVTNDGDMRPYCWHYPPRPCGIVPARTVCGPVYCFTPSPVVVGTTDKQGVPTYTWGENETDVFLLNSTRPPRGAWFGCTWMNGTGFTKTCGAPPCRIRKDYNSTIDLLCPTDCFRKHPDATYLKCGAGPWLTPRCLVDYPYRLWHYPCTVNFTIFKARMYVGGVEHRFSAACNFTRGDRCRLEDRDRGQQSPLLHSTTEWAVLPCSFSDLPALSTGLLHLHQNIVDVQYLYGLSPALTRYIVKWEWVILLFLLLADARICACLWMLIILGQAEAALEKLIILHSASAASANGPLWFFIFFTAAWYLKGRVVPVATYSVLGLWSFLLLVLALPQQAYALDAAEQGELGLAILVIISIFTLTPAYKILLSRSVWWLSYMLVLAEAQIQQWVPPLEVRGGRDGIIWVAVILHPRLVFEVTKWLLAILGPAYLLKASLLRIPYFVRAHALLRVCTLVKHLAGARYIQMLLITIGRWTGTYIYDHLSPLSTWAAQGLRDLAIAVEPVVFSPMEKKVIVWGAETVACGDILHGLPVSARLGREVLLGPADGYTSKGWKLLAPITAYTQQTRGLLGAIVVSLTGRDKNEQAGQVQVLSSVTQTFLGTSISGVLWTVYHGAGNKTLAGPKGPVTQMYTSAEGDLVGWPSPPGTKSLDPCTCGAVDLYLVTRNADVIPVRRKDDRRGALLSPRPLSTLKGSSGGPVLCSRGHAVGLFRAAVCARGVAKSIDFIPVESLDVATRTPSFSDNSTPPAVPQSYQVGYLHAPTGSGKSTKVPAAYASQGYKVLVLNPSVAATLGFGAYMSKAHGINPNIRTGVRTVTTGDSITYSTYGKFIADGGCAAGAYDIIICDECHSVDATTILGIGTVLDQAETAGVRLVVLATATPPGTVTTPHSNIEEVALGHEGEIPFYGKAIPLAFIKGGRHLIFCHSKKKCDELAAALRGMGVNAVAYYRGLDVSVIPTQGDVVVVATDALMTGYTGDFDSVIDCNVAVSQIVDFSLDPTFTITTQTVPQDAVSRSQRRGRTGRGRLGVYRYVSSGERPSGMFDSVVLCECYDAGAAWYELTPAETTVRLRAYFNTPGLPVCQDHLEFWEAVFTGLTHIDAHFLSQTKQGGENFAYLTAYQATVCARAKAPPPSWDVMWKCLTRLKPTLTGPTPLLYRLGAVTNEVTLTHPVTKYIATCMQADLEIMTSSWVLAGGVLAAVAAYCLATGCISIIGRLHLNDRVVVAPDKEILYEAFDEMEECASKAALIEEGQRMAEMLKSKIQGLLQQATRQAQDIQPAIQSSWPKLEQFWAKHMWNFISGIQYLAGLSTLPGNPAVASMMAFSAALTSPLPTSTTILLNIMGGWLASQIAPPAGATGFVVSGLVGAAVGSIGLGKILVDVLAGYGAGISGALVAFKIMSGEKPTVEDVVNLLPAILSPGALVVGVICAAILRRHVGQGEGAVQWMNRLIAFASRGNHVAPTHYVVESDASQRVTQVLSSLTITSLLRRLHAWITEDCPVPCSGSWLQDIWDWVCSILTDFKNWLSSKLLPKMPGIPFISCQKGYKGVWAGTGVMTTRCPCGANISGHVRMGTMKITGPKTCLNLWQGTFPINCYTEGPCVPKPPPNYKTAIWRVAASEYVEVTQHGSFSYVTGLTSDNLKVPCQVPAPEFFSWVDGVQIHRFAPVPGPFFRDEVTFTVGLNSFVVGSQLPCDPEPDTEVLASMLTDPSHITAEAAARRLARGSPPSQASSSASQLSAPSLKATCTTHKTAYDCDMVDANLFMGGDVTRIESDSKVIVLDSLDSMTEVEDDREPSVPSEYLIKRRKFPPALPPWARPDYNPVLIETWKRPGYEPPTVLGCALPPTPQTPVPPPRRRRAKVLTQDNVEGVLREMADKVLSPLQDNNDSGHSTGADTGGDIVQQPSDETAASEAGSLSSMPPLEGEPGDPDLEFEPVGSAPPSEGECEVIDSDSKSWSTVSDQEDSVICCSMSYSWTGALITPCGPEEEKLPINPLSNSLMRFHNKVYSTTSRSASLRAKKVTFDRVQVLDAHYDSVLQDVKRAASKVSARLLTVEEACALTPPHSAKSRYGFGAKEVRSLSRRAVNHIRSVWEDLLEDQHTPIDTTIMAKNEVFCIDPTKGGKKPARLIVYPDLGVRVCEKMALYDIAQKLPKAIMGPSYGFQYSPAERVDFLLKAWGSKKDPMGFSYDTRCFDSTVTERDIRTEESIYQACSLPQEARTVIHSLTERLYVGGPMTNSKGQSCGYRRCRASGVFTTSMGNTMTCYIKALAACKAAGIVDPVMLVCGDDLVVISESQGNEEDERNLRAFTEAMTRYSAPPGDLPRPEYDLELITSCSSNVSVALDSRGRRRYFLTRDPTTPITRAAWETVRHSPVNSWLGNIIQYAPTIWVRMVIMTHFFSILLAQDTLNQNLNFEMYGAVYSVNPLDLPAIIERLHGLEAFSLHTYSPHELSRVAATLRKLGAPPLRAWKSRARAVRASLIAQGARAAICGRYLFNWAVKTKLKLTPLPEASRLDLSGWFTVGAGGGDIYHSVSHARPRLLLLCLLLLSVGVGIFLLPAR

SEQ ID NO: 1716 - protein, 3010 aa, Artificial
  HCV
MSTNPKPQRKTKRNTNRRPQDVKFPGGGQIVGGVYLLPRRGPRLGVRATRKTSERSQPRGRRQPIPKARQPEGRAWAQPGYPWPLYGNEGLGWAGWLLSPYGSRPRWGPTDPRRRSRNLGKVIDTLTCGFADLMGYIPLVGAPLGGAARALAHGVRVLEDGVNYATGNLPGCSFSIFLLALLSCLTVPVSTYEVRNVSGVYHVTNDCSNSSIVYEAADMIMHTPGCVPCVREGNSSRCWVALTPTLAARNSSIPTTTIRRHVDLLVGAAALCSAMYVGDLCGSVFLVSQLFTFSPRRYETVQDCNCSLYPGHVSGHRMAWDMMMNWSPTTALVVSQLLRIPQAVVDMVVGAHWGVLAGLAYYSMVGNWAKVLIVMLLFAGVDGTTYVSVGHASQTTRRVASFFSPGSAQKIQLVNTNGSWHINRTALNCNESINTGFFAALFYVKKFNSSGCSERMASCRPIDRFAQGWGPITHAESRSSDQRPYCWHYAPQPCGIVPALQVCGPVYCFTPSPVVVGTTDRFGVPTYNWGDNETDVLLLNNTRPPQGNWFGCTWMNSTGFTKTCGGPPCNIGGAGNNTLTCPTDCFRKHPEATYTKCGSGPWLTPRCMVDYPYRLWHYPCTFNFTIFKIRMYVGGVEHRLNAACNWTRGERCNIEDRDRSELSPLLLSTTEWQILPCSFTTLPALSTGLIHLHQNIVDVQYLYGVGSAVVSIVIKWEYVLLLFLLLADARVCACLWMMLLIAQAEAALENLVVLNAASVAGAHGILSFLVFFCAAWYIKGRLVPGAAYAFYGVWPLLLLLLALPPRAYAMDREMAASCGGAVFVGLALLTLSPHYKAFLARLIWWLQYFITRVEACLQVWVPPLNVRGGRDAIILLTCAVHSELIFDITKILLAIFGPLMVLQAGLTRVPYFVRAQGLLRACMLVRKVAGGHYVQMALMKLAALTGTYVYDHLTPLRDWAHSGLRDLVVAVEPVVFSDMETKIITWGADTAACGDIILGLPVSARRGREILLGPADGFREQGWRLLAPITAYSQQTRGLFGCIVTSLTGRDKNQVEGEAQVVSTATQSFLATCVNGVCWTVYHGAGSKTLAGPKGPINQMYTNVDQDLVGWQAPSGAASLTPCTYGSSDLYLVTRHADVIPVRRRGDSRGSLLSPRPVSYLKGSSGGPLLCPSGHAVGIFRAAVCTRGVAKAVDFIPVESMETTMRSPVFTDNSSPPAVPQTFQVAHLHAPTGSGKSTKVPAAYAAQGYKVLVLNPSVAATLGFGAYMSKAHGVDPNISTGVRTITTGAPITYSTYGKFLADGGCSGGAYDIIICDECHSTDSTSILGIGTVLDQAETAGARLVVLAAATPPGSVTVPHPNIEEVALPNTGEIPFYGKAIPLETIKGGRHLIFCHSKKKCDELAAKLSALGVNAVAYYRGLDVSVIPTSGDVVVVATDALMTGYTGDFDSVIDCNTCVTQTVDFSLDPTFTIETTTLPQDAVSRSQRRGRTGRGRGGIYRFVTPGERPSGMFDSSVLCECYDAGCAWYELTPAVTSVRLRAYLNTPGLPVCQVHLEFWESVFTGLTHIDAHFLSQTKQAGENFPYLVAYQATVCARAQAPPPSWDQMWKCLIRLKPTLHGPTPLLYRLGAVQNEVTLTHPITKFIMACMSADLEVVTSTWVLVGGVLAALAAYCLTTGSVVIVGRIILSGRPAIIPDREVLYQEFDEMEECASHLPYIEQGMQLAEQFKQKALGLLQTASKQAEAAAPVVESKWQALEAFWAKHMWNFISGIQYLAGLSTLPGNPAIVSLMAFTASITSPLTTQHTLLFNILGGWVAAQLAPPSAASAFVGAGIAGAAVGSIGLGKVLVDILAGYGAGVAGALVAFKGMSGEMPSTEDLVNLLPAILSPGALVVGVVCAAILRRHVGPGEGAVQWMNRLIAFASRGNHVSPTHYVPESDAAARVTKILSSLTITQRLRRLHQWINEDCSTPCSGSWLRDVWDWICTVLTDFKTWLQSKLLPRLPGDPFFSCQRGYRGVWRGDGVMQTTCPCGAQITGHVKNGSMRIVGPKTCSNTWHGTFPINAYTTGPCTPSPAPNYSRALWRVAAEEYVEVTRVGDFHYVTGMTTDNVKCPCQVPAPEFFTEVDGVRLHRYAPACKPLLRDEVTFQVGLNQFPVGSQLPCEPEPDVTVLTSMLTDPSHITAETAKRRLARGSPPSLASSSASQLSAPSLKATCTTRHDSPDADLIEANLLWRQEMGGNITRVESENKVVILDSFEPLRAEEDEREVSVAAEILRKSRKFPPALPIWARPSYNPPLLESWKDPDYVPPVVHGCPLPPTMAPPIPPPRRKRTVVLTESTVSSALAELATKTFGSSGSSAVDSGTATAPPDQPSDDGDRGSDDESYSSMPPLEGEPGDPDLSDGSWSTVSEEASEDVACCSMSYTWTGALITPCAAEESKLPINPLSNSLLRHHNMVYATTSRSAGLRQKKVTFDRLQVPDDHYRDVLKEMKAKASTVKAKLLSVEEACKLTPPHSARSKFGYGAKDVRNLSSKAVNHIHSVWKDLLEDTETPIDTTIMAKNEVFCVQPEKGGRKPARLIVFPELGVRVCEKMALYDVVSTLPQAVMGSSYGFQYSPGQRVEFLVNAWKSKKNPMGFAYCTRCFDSTVTESDIRVEESIYQCCDLAPEARQVIRSLTERLYIGGPLTNSKGQNCGYRRCRASGVLTTNCGNTLTCYLKASAACRAAKLQDCTMLVCGDDLVVICESAGTQEDAASLRVFTEAMTRYSAPPGDPPQPEYDLELITSCSSNVSVAHDASGKRVYYLTRDPTTPLARAAWETARHTPVNSWLGNIIMYAPTLWARMILMTHFFSILLAQEQLEKALGCQIYGATYFIEPLDLPQIIQRLHGLSAFSLHSYSPGEINRVASCLRKLGVPPLRVWRHRARSVRAKLLSQGGRAATCGKYLFNWAVRTKLKLTPIPAASQLDLSGWFVAGYSGGDIYHSLSRARPRWFMWCLLLLSVGVGIYLLPNR

SEQ ID NO: 1717 - protein, 3010 aa, Artificial
  HCV
MSTNPKPQRKTKRNTNRRPQDVKFPGGGQIVGGVYLLPRRGPRLGVRATRKTSERSQPRGRRQPIPKARRPEGRTWAQPGYPWPLYGNEGMGWAGWLLSPRGSRPNWGPTDPRRRSRNLGKVIDTLTCGFADLMGYIPLVGAPLGGVARALAHGVRVLEDGVNYATGNLPGCSFSIFLLALLSCLTTPASAYEVRNVSGIYHVTNDCSNSSIVYEAADIIMHTPGCVPCVREKNISRCWVALTPTLAARNISVPTATIRRHVDLLVGTAAFCSAMYVGDLCGSVFLVSQLFTFSPRWHETVQDCNCSLYPGHVSGHRMAWDMMMNWSPTAALVVSQLLRIPQAVVDMVAGAHWGVLAGLAYYSMIGNWAKVLIVMLLFAGADGTTHVTGGVQAHGAYGLASLFNVGPHQKIQLVNTNGSWHINRTALNCNDTLQTGFLAALFYKHRFNASGCPERMASCRPIDKFAQGWGPITYAEPDRLDQRPYCWHYPPRPCGIVPALEVCGPVYCFTPSPVVVGTTDRFGVPTYSWGENETDVLLLNNTRPPQGNWFGCTWMNSTGYTKTCGGPPCNIGGVGNNTLTCPTDCFRKHPEATYTKCGSGPWLTPRCLVHYPYRLWHYPCTVNFTIFKVRMYVGGIEHRLDAACNWTRGERCDLEDRDRSELSPLLLSTTEWQILPCSFTTLPALSTGLIHLHRNIVDVQYLYGIGSAVVSFAIKWEYVLLLFLLLADARVCACLWMMLLIAQAEAALENLVVLNAASVAGAHGILSFLVFFCAAWCIKGRLVPGAAYAFYGVWPLLLLLLALPPRAFAMDREMAASCGGAVFVGLALLTLSPHYKVFLARLMWRLQYLITRAEAHLQIWVPPLNIRGGRDAIILLMCAVHPELIFDITKLLLAILGPLMVLQAGITRVPYFVRAQGLIRACMLVRKVAGGHYVQMAFVKLAALTGTYVYDHLAPLQHWAHTGLRDLAVAVEPVVFSDMETKIITWGADTAACGDIILGLPVSARRGREILLGPADSLEGQGWRLLAPITAYSQQTRGLLGCIITSLTGRDKNQVEGEVQVVSTATQSFLATCINGVCWTVFHGAGSKTLAGPKGPITQMYTNVDQDLVGWQAPPGARSMTPCTCGSSDLYLVTRHADVIPVRRRGDSRGSLLSPRPVSYLKGSSGGPLPCPSGHAVGIFRAAVCTRGVAKAVDFIPVESMETTMRAPVFTDNSSPPAVPQTFQVAHLHAPTGSGKSTKVPAAYAAQGYKVLVLNPSVAATLGFGAYMSKAYGTDPNIRTGVRTITTGAPITYSTYGKFLADGGCSGGAYDIIMCDECHSTDSTTILGIGTALDQAETAGARLVVLATATPPGSVTVPHPNIEEVALSNTGEIPFYGKAIPIEVIKGGRHLIFCHSKKKCDELAAKLSTLGLNAVAYYRGLDVSVIPTSGDVVVVATDALMTGFTGDFDSVIDCNTCVTQTVDFSLDPTFTIETTTVPQDAVSRSQRRGRTGRGRGGIYRFVTPGERPSGMFDSSVLCECYDAGCAWYELTPAETSVRLRAYLNTPGLPVCQDHLEFWESVFTGLTHIDAHFLSQTKQAGDNFPYLVAYQATVCARAQASPPSWDQMWKCLTRLKPTLHGPTPLLYRLGAVQNEVTLTHPITKYIMACMSADLEVVTSTWVLVGGVLAALAAYCLTTGSVVIVGRIILSGKPAVIPDREVLYREFDEMEECASHLPYIEQGMQLAEQFKQKALGLLQTATKQAEAAAPVMESKWRALETFWAKHMWNFISGIQYLAGLSTLPGNPAIASLMAFTASITSPLTTQSTLLFNILGGWVAAQLAPPSAASAFVGAGIVGAAVGSIGLGKVLVDILAGYGAGVAGALVAFKIMSGEMPATEDLVNLLPAILSPGALVVGVVCAAILRRHVGPGEGAVQWMNRLIAFASRGNHVSPTHYVPESDAAARVTQILSSLTITQLLKRLHQWINEDCSTPCSGSWLRDIWDWICTVLTDFKTWLKSKLMPRLPGVPFFSCQRGYRGVWRGDGIMHTTCPCGAQITGHVKNGSMRIVGPKTCSNTWHGTFPINAYTTGPCTPSPAPNYSRALWRVAAEEYVEVTRVGDFHYVTGMTTDNVKCPCQVPAPEFFTEVDGVQLHRYAPACKPLLRDEVTFQVGLNQYLVGSQLPCEPEPDVAVLTSMLTDPSHITAEAAKRRLARGSPPSLASSSASQLSAPSLKATCTTHHDSPDADLIEANLLWRQEMGGNITRVESENKVVILDSFDPLHAEEDEREVSVAAEILRKSRKFPPALPIWARPDYNPPLLESWKDPDYVPPVVHGCPLPPTKAPPIPPPRRKRTVVLTESTVSSALAELATKTFGSSGSSAADSGTATAPPDQASDDGDKGSDVESYSSMPPLEGEPGDPDLSDGSWSTVSEEASEDVVCCSMSYTWTGALITPCAAEESKLPINPLSNSLLRHHNMVYATTSRSAGLRQKKVTFDRLQVLDDHYRDVLKEMKAKASTVKAKLLSIEEACKLTPPHSAKSKYGYGAKDVRNLSSRAVNHIRSVWEDLLEDTETPIDTTIMAKSEVFCVQPEKGGRKPARLIVFPDLGVRVCEKMALYDVVSTLPQAVMGSSYGFQYSPKQRVEFLVNTWKSKKCPMGFSYDTRCFDSTVTENDIRVEESIYQCCDLAPEAKLAIRSLTERLYIGGPLTNSKGQNCGYRRCRASGVLTTSCGNTLTCYLKASAACRAAKLQDCTMLVNGDDLVVICESAGTQEDAASLRVFTEAMTRYSAPPGDPPQPEYDLELITSCSSNVSVAHDASGKRVYYLTRDPTTPIARAAWETARHTPVNSWLGNIIMYAPTLWARMILMTHFFSILLAQEQLEKALDCQIYGACYSIEPLDLPQIIERLHGLSAFSLHSYSPGEINRVASCLRKLGVPPLRVWRHRARGVRAKLLSQGGRAATCGKYLFNWAVRTKLKLTPIPAASRLDLSGWFVAGYSGGDIYHSLSRARPRWFMWCLLLLSVGVGIYLLPNR

SEQ ID NO: 1718 - protein, 3010 aa, Artificial
  HCV
MSTNPKPQRKTKRNTNRRPQDVKFPGGGQIVGGVYLLPRRGPRLGVRATRKTSERSQPRGRRQPIPKARRPEGRAWAQPGYPWPLYGNEGLGWAGWLLSPRGSRPSWGPTDPRRRSRNLGKVIDTLTCGFADLMGYIPLVGAPLGGAARALAHGVRVLEDGVNYATGNLPGCSFSIFLLALLSCLTIPASAYEVCNASGLYHVTNDCSNSSIVYEAQDMIMHTPGCVPCVRENNSSRCWVALTPTLAARNASIPTTTIRRHVDLLVGAAAFCSAMYVGDLCGSVFLVSQLFTFSPRRYETVQDCNCSIYPGHVSGHRMAWDMMMNWSPTTALVVSQLLRIPQAVVDMVAGAHWGVLAGLAYYSMVGNWAKVLIVMLLFAGVDGNTYTTGAAQGRTVSRLTSIFTPGASQNIQLINTNGSWHINRTALNCNDSLQTGFIAALFYARRFNSSGCPQRLASCRSIDKFAQGWGPITYAEGHDSDQRPYCWHYAPRPCGIVPAQQVCGPVYCFTPSPVVVGTTDRFGAPTYNWGANETDVLLLNNTRPPQGNWFGCTWMNGTGFTKTCGGPPCNIGGAGNNTLTCPTDCFRKHPEATYAKCGSGPWLTPRCIVDYPYRLWHYPCTVNFSIFKVRMYVGGVEHRLTAACNWTRGERCDLEDRDRSELSPLLLSTTEWQILPCSFTTLPALSTGLIHLHQNIVDVQYLYGVGSAVVSFAIKWEYVLLLFLLLADARVCACLWMMLLVAQAEAALENLVVLNAASLAGVHGILSFLVFFCAAWYIKGKLVPGAAYALYGVWPLLLLLLALPPRAYAMDREMAASCGGAVFIGLALLTLSPYYKVFLAKLIWWLQYLITRAEAQLQVWIPPLNVRGGRDAIILLTCAVHPELIFDITKIVLAILGPLMVLQAGIAKVPDFVRAQGVIRECILVRKVGGGQYVQMAFMKLAELKGTSVYDHLTPLRDWAHTGLRDLAVAVEPVVFSDMEIKIITWGGDTAACGDIIMGLPVSARRGREILLGPADSLEGQGWRLLAPITAYSQQTRGLFGCIITSLTGRDKNQVEGEVQVVSTATQSFLATCVNGVCWTVYHGAGSKTLAGPKGPITQMYTNVDQDLVGWPAPPGARSLTPCTCGGSDLYLVTRHADVIPVRRRGDSRGSLLSPRPISYLKGSSGGPLLCPSGHVVGIFRAAVCTRGVAKAVDFVPVESMETTMRSPVFTDNSSPPAVPQTFQVAHLHAPTGSGKSTKVPAAYAAQGYKVLVLNPSVTATLGFGAYMSKAHGVDPNIRTGVRTITTGAPITYSTYGKFLADGGCSGGAYDIIMCDECHSIDSTSILGIGTVLDQAETAGARLVVLATATPPGSVTVPHPNIEEIALSNTGEIPFYGKAIPIETIKGGRHLIFCHSKKKCDELAAKLSGLGLNAVAYYRGLDVSVIPASGDVVVVATDALMTGFTGDFDSVIDCNTCVTQTVDFSLDPTFTIETTTVPQDAVSRSQRRGRTGRGRRGIYRFVTPGERPSGMFDSSVLCECYDAGCAWYELTPAETSVRLRAYLNTPGLPFCQDHLEFWEGVFTGLTHIDAHFLSQTKQAGENLPYLVAYQATVCARAQAPPPSWDQMWKCLTRLKPTLHGPTPLLYRLGAVQNDVTLTHPITKYIMTCMSADLEVVTSTWVLVGGVLAALTAYCLTTGSVVIVGRIILSGKPAVIPDREALYQEFDEMEECASHLPYIEQGMQLAEQFKQKALGLLQTATNQAEAAAPVVESKWRALEAFWAKHMWNFISGIQYLAGLSTLPGNPAIASLMAFTASITSPLTTQSTLLFNILGGWVAAQLAPPRAVSAFVGAGIAGAAVGSIGLGKVLVDILAGYGAGVAGALVAFKVMSGEMPSTEDLVNLLPAILSPGALVVGVVCAAILRRHVGPGEGAVQWMNRLIAFASRGNHVSPTHYVPESDAAARVTQILSSLTITQLLRRLHQWINEDCSTPCSGSWLRDVWDWICTVLTDFKTWLQSKLLPRLPGVPFFSCQRGYRGVWRGDGIMQTTCPCGAQITGHVKNGSMRIVGPKTCSNTWHGTFPINAYTTGPCTPSPAPNYSRALWRVAAEEYVEVTRVGDFHYVTGMTTDNVKCPCQVPPPEFFTEVDGVRLHRNAPACGPLLREEVTFQVGLNQYLVGSQLPCEPEPDVTVLTSMLTDPSHITGEAAKRRLARGSPPSLASSSASQLSAPSLKATCTTHHDSPDADLIEANLLWRQEMGGNITRVESENKVIILDSFDPLRAEEDEREVSIPAEILRKSKKFPPALPIWARPDYNPPLLESWKDPDYVPPVVHGCPLPPAKAPPIPPPRRKRTVVLTESTVSSALAELATKTFGSSGSSAADRGTATAPPDQASNDGDAGSDVGSYSSMPPLEGEPGDPDLSDGSWSTVSEEAGEDVVCCSMSYTWTGALITPCAAEESKLPINALSNSLLRHHNMVYATTSRSASQRQKKVTFDRLQVLDDHYRDVLKEMKAKASTVKAKLLSVEEACRLTPPHSARSKFGYGAKDVRNLSSGAVNHIRSVWKDLLEDTETPIDTTIMAKNEVFCVQPEKGGRKPARLIVFPDLGVRVCEKMALYDVVSTLPQAVMGSSYGFQYSPGQRVEFLVNAWKSKKCPMGFAYDTRCFDSTVTESDIRVEESIYQCCDLAPEARQAIRSLTERLYIGGPLTNSKGQNCGYRRCRASGVLTTSCGNTLTCYLKASAACRAAKLQDCTMLVCGDDLVVICESAGTQEDAASLRVFTEAMTRYSAPPGDPPQPEYDLELITSCSSNVSVAHDASGKRVYYLTRDPTTPLARAAWETAKSTPVNSWLGNIIMFAPTLWVRMILMTHFFSILLAQEQLEKALDCQIYGACYSIEPLDLPQIIQRLHGLSAFSLHSYSPGEINRVASCLRKLGVPPLRTWRHRARSVRAKLLSQGGRAATCGRYLFNWAVKTKLKLTPIPAASQLDLSNWFVAGYSGGDVYHSLSRARPRWFMLCLLLLSVGVGIYLLPNR

SEQ ID NO: 1719 - protein, 3010 aa, Artificial
  HCV
MSTNPKPQRKTKRNTNRRPQDVKFPGGGQIVGGVYLLPRRGPRLGVRATRKTSERSQPRGRRQPIPKARQPEGRAWAQPGYPWPLYGNEGMGWAGWLLSPRGSRPSWGPTDPRRRSRNLGKVIDTLTCGFADLMGYIPLVGAPLGGASRALAHGVRVLEDGVNYATGNLPGCSFSIFLLALLSCLTIPASAYEVRNASGVYHVTNDCSNASIVYEAADMIMHTPGCVPCVREANSSRCWVALTPTLAARNSSVPTTTIRRHVDLLVGAAAFCSAMYVGDLCGSVFLVSQLFTFSPRRHETVQDCNCSIYPGHVSGHRMAWDMMMNWSPTTALVVSQLLRIPQAVMDMVAGAHWGVLAGLAYYSMVGNWAKVLIVMLLFAGVDGNTYVSGGAKSHTTQGLVSLFAPGAQQKIQLVNTNGSWHINRTALNCNDSLNTGFLAALFYTHRFNSSGCPERIASCRSIDAFAQGWGPITYAEPGSSDQRPYCWHYAPRPCGIVPASEVCGPVYCFTPSPVVVGTTDRSGAPTYSWGENETDVLLLNNTRAPQGNWFGCTWMNGTGFTKTCGGPPCNIGGVGNNTLTCPTDCFRKHPEATYTKCGSGPWLTPRCMVDYPYRLWHYPCTVNFTIFKVRMYVGGVEHRLNAACNWTRGERCDLEDRDRSELSPLLLSTTEWQILPCSFTTLPVLSTGLIHLHQNIVDVQYLYGVGSAVVSFVIKWEYILLLFLLLADARVCACLWMMLLIAQAEAALENLVVLNAASVAGAHGFLSFLVFFCAAWYIKGKLVPGAAYAFYGVWPLLLLLLALPPRAYAMDREMAASCGGAVFVGLALLTLSPHYKVVLARLIWWLQYFITRAEACLQVWIPPLNVRGGRDAIILLTCALHPELIFSITKILVAILGPLMVLQAGITKMPYFVRAQGLIRACMLVRKVAGGHYVQMAFMKLAALTGTYVYDHLTPLQDWAHTGLRDLAVAVEPVVFSDMETKIITWGADTAACGDIILGLAVSARRGKEIFLGPADSLEGSGWRLLAPITAYSQQTRGLLGCIITSLTGRDKNQVEGEVQVVSTATQSFLATCTNGVCWTVYHGAGSKTLAGPKGPITQMYTNVDQDLVGWQAPSGARSLTPCTCGSSDLYLVTRHADVIPVRRRGDGRGSLLSPRPVSYLKGSSGGPLLCPSGHAVGIFRAAVCTRGVAKAVDFIPVESMETTMRSPVFTDNSSPPAVPQTFQVAHLHAPTGSGKSNKVPVEYAAQGYKVLVLNPSVAATLGFGAYMSKAHGVDPNIRTGVRTITTGAPITYSTYGKFLADGGCSGGAYDIIICDECHSTDSTSILGIGTVLDQAETAGARLVVLATATPPGSVTVPHPNIEEVALSNTGEIPFYGKAIPIETIKGGRHLIFCHSKKKCDELAAKLSGLGINAVAYYRGLDVSVIPASGDVVVVATDALMTGFTGDFDSVIDCNTCVTQTVDFSLDPTFTIETTTVPQDAVSRSQRRGRTGRGRAGIYRFVTPGERPSGMFDSSVLCECYDAGCAWYELTPAETSVRLRAYLNTPGLPVWQDHLEFWESVFTGLTHIDAHFLSQTKQAGDNFPYLVAYQATVCARAQAPPPSWDQMWKCLIRLKPTLHGPTPLLYRLGAVQNEVILTHPITKYIMACMSADLEVVTSTWVLVGGVLAALAAYCLTTGSVVIVGRIILSGKPAIIPDREVLYREFDEMEECASHLPYIEQGMQLAEQFKQKALGLLQTATKQAEAAAPVVESKWQALETFWAKHMWNFISGIQYLAGLSTLPGNPAIASLMAFTASITSPLTTQHTLLFNILGGWVAAQLAPPRAASAFVGAGIAGAAVGSIGLGKVLVDILAGYGAGVAGALVAFKVMSGDMPSTEDLVNLLPAILSPGALVVGVVCAAILRRHVGPGEGAVQWMNRLIAFASRGNHVSPTHYVPESDAAARVTQILSSLTITQLLKRLHQWINEDCSTPCSGSWLRDVWDWICTVLSDFKTWLQSRVLPRLPGVPFLSCQRGYKGVWRGDGIMQTTCPCGAQITGHVKNGSMRIVGPKTCSNTWHGTFPINAYTTGPCTPSPAPNYSRALWRVAAEEYVEVTRVGDFHYVTGMTTDNLKCPCQVPAPEFFKELDGVRLHRYAPASKPLLRDEVTFQVGLNQYVVGSQLPCEPEPDVAVLTSMLTDPSHITAETAKRRLARGSPPSLASSSASQLSAPSLKATCTTHHDSPDADLIEANLLWRQEMGGNITRVESENKVVILDSFEPLRAEEDEREVSLPAEILRKSRKFPRAMPIWARPDYNPPLIESWKDPDYVPPVVHGCPLPPTKAPPIPPPRRKRTVVLTESTVSSALAELATKTFGSSESSAADSGTATAPPDQPSSDGDAGSDVESYSSMPPLEGEPGDPDLSDGSWSTVSEEAGEDVVCCSMSYTWTGALITPCAAEESKLPINALSNSLLRHHNMVYATTSRSASQRQKKVTFDRLQVLDDHYRDVLKEMKAKASTVKARLLSVEEACKLTPPHSARSKFGYGAKDVRNLSSRAINHIRSVWKDLQEDTETPIDTTIMAKNEVFCVQPEKGGRKPARLIVFPDLGVRVCEKMALYDVVSTLPQAVMGASYGFQYSPGQRVEFLVNAWKSKKCPMGFAYDTRCFDSTVTENDIRVEESIYQCCDLAPEARQAIRSLTERLYIGGPLTNSKGQNCGYRRCRASGVLTTSCGNTLTCYLKATAACRAAKLQDCTMLVCGDDLVVICESAGTQEDAASLRVFTEAMTRYSAPPGDPPQPEYDLELITSCSSNVSVAHDASGKRVYYLTRDPTTPLARAAWETARHTPVNSWLGNIIMYAPTLWARMILMTHFFSILLAQEQLEKALDCQIYGACYSIEPLDLPQIIQRLHGLSAFSLHSYSPGEINRVASCLRKLGVPPLRVWRHRARSVRAKLLSQGGRAAICGKYLFNWAVRTKLKLTPIPAASQLDLSGWFVAGYSGGDIYHSVSRARPRWFMWCLLLLSVGVGIYLLPNR

SEQ ID NO: 1720 - protein, 3010 aa, Artificial
  HCV
MSTNPKPQRKTKRNTNRRPQDVKFPGGGQIVGGVYLLPRRGPRLGVRATRKTSERSQPRGRRQPIPKVRRSEGRTWAQPGYPWPLYGNEGLGWAGWLLSPRGSRSSWGPTDPRRRSRNLGKVIDTLTCGFADLMGYIPVVGPPLGGVARALAHGVRVLEVGVNYATGNLPGCSFSIFLLALLSCLTIPASAYEVRNVSGVYHVTNDCSNSSIVYEAEDVIMHTPGCLPCVRENNSSRCWVALTPTLAGRNSSIPTTTIRRHVDLLVGAAAFCSAMYVGDLCGSVFLVSQLFTFSPRRYETVQDCNCSLYPGHITGHRMAWDMMMNWSPTTALVVSQLLRIPQAVVDMVAGAHWGVLAGLVYYSMVGNWAKVLIVMLLFVGVDGSTHVSGGTTAYNTRSFTSLFSSGAQQKIQLVNTNGSWHINRTALNCNDTLQTGFLAALFYTHRFNDSGCPERMASCRPIDKFAQGWGPITYVKPDILDQRPYCWHYAPRPCGIVPASEVCGPVYCFTPSPVVVGTTDRSGAPTYNWGGNETDVLLLNNTRPPQGNWFGCTWMNSTGFTKTCGGPPCNIGGAGNNTFTCPTDCFRKHPEATYTKCGSGPWLTPRCIVDYPYRLWYYPCTVNFTIFTIRMYVGGVEHRLKAACNWTRGERCNLEDRDRAELSPLLLSTTEWQILPCSFTTLPALSTGLIHLHQNIVDVQYLYGVGSAVVSVVIRWEYVLLLFLLLADARVCACLWMMLLIAQAEAALENLVILNAASVAGAHGILSFLVFFCAAWYIKGKLVPGAAYAFYGVWPLLLLLLSLPPRAYAMDREMAASCGGAVFIGLMLLTLSPHYKAFLAKLIWWLQYFITRAEAHLQVWIPPLNVRGGRDAIILLTCAVHSELVFEITKILLAIFGPLMVLQAGLTKVPYFVRAQGLIRACMLVRKVAGGHYVQMAFVKLAALTGTYVYNHLTPLQDWAHTGLRDLAVAVEPVVFSDMETKIITWGADTAACGDIISGLAVSARRGREILLGPADSFEGQGWRLLAPITAYSQQTRGLLGCIITSLTGRDKNQVEGEVQVVSTATQSFLATCVNGVCWTVYHGAGSKTLAGPKGPITQMYTNVDQDLVGWQAPPGARSLTPCTCGSSDLYLVTRHADVIPVRRRGDSRGSLLSPRPVSYLKGSSGGPLLCPSGHAVGIFRAAVCTRGVAKAVDFVPVESMETTMRSPVFTDNSSPPAVPQTFQVAHLHAPTGSGKSTKVPAAYAAQGYKVLVLNPSVAATLGFGAYMSKAHGVDPNIRTGARTITTGAPITYSTYGKFLADGGCSGGAYDIIICDECHSTDSTSILGIGTVLDQAETAGARLVVLATATPPGSVTVPHPNIEEVALSNTGEIPFYGKAIPLDTIKGGRHLIFWHSKKKCDELATKLSALGVNAVAYYRGLDVSVIPTSGNVVVVATDALMTGYTGDFDSVIDCNTCVIQTVDFSLDPTFTIETTTVPQDAVSRSQRRGRTGRGRRGIYRFVTPGERTSGMFDSSVLCECYDAGCAWYELTPAETSVRLRAYLNTPGLPVCQDHLEFWESVFTGLTHIDAHFLSQTKQAGDNFPYLVAYQATVCARAQAPPPSWDQMWKCLIRLKPTLHGPTPLLYRLGAVQNEVTLTHPITKFIMACMSADLEVVTSTWVLVGGVLAALAAYCLTTGSVVIVGRIILSGKPAVIPDREVLYREFDEMEECASHLPYIEQGMQLAEQFKQKALGLLQTATKQAEAAAPVVESKWRTLEVFWAKHMWNFISGIQYLAGLSTLPGNPAIASLMAFTASITSPLTTQHTLLFNILGGWVAAQLAPPRAASAFVGAGIAGAAVGSIGLGKVLVDILAGYGAGVAGALVDFKVMSGEMPSAEDIVNLLPAILSPGALVVGVVCAAILRRHVGPGEGAVQWMNRLIAFASRGNHVSPTHYVPESDAAVRVTQILSNLTITQLLKRLHQWISEDCSTPCSGSWLRDVWDWICTVLTDFKTWLQSKLLPRLPGIPFFSCQRGYKGVWRGDGVMHTICPCGAQIAGHFKNGSMKIVGPKTCSNTWDGTFPINGYTTGSSTPTPASNYSKALWRVVFEEYVEVTRVGDFHYVTGMTTDNVKCPCQVPPPEFFTELDGVRLHRYAPVSKPLLRDEVTFQVGLNRYPVGSQLPCEPEPDVAVLTSMLTDPSHITAETAKRRLARGSPPSLASSSASQLSAPSLKATCTTHHDSPDADLIEANLLWRQEMGGNITRVESENKVVILDSFDPLRAEEDEREVSVAAEILRKTRKFPPALPIWARPDYNPPLLEPWRDPDYAPPVVHGCPLPPAKDPPIPPPRRKRTVVLTESTVSSALAELATKTFGSSGSSAVDSGTATAPPDQTSNDGDTGSDVGSYSSMPPLEGEPGDPDLSDGSWSTVSEEAGEDVVCCSMSYTWTGALITPCAAEESKLPINALSNSLLRHHNMVYATTSRSASQRQRKVTFDRLQVLDDHYRDVLKEMKAKASTVKAKLLSVEEACKLTPPHSAKSKFGYGGKDVRNLSSKAVNHIRSVWKDLLEDTETPIDTTVMAKNEVFCVQPEKGGRKAARLIVFPDLGVRVCEKMALYDVVSTLPQAVMGSSYGFQYSPGQRVEFLVNAWKSKKSPMGFAYDTRCFDSTVTENDIRTEESIYQCCDLAPEARQVIRSLTERLYVGGPLTNSKGQNCGYRRCRASGVLTTSCGNTLTCYLKAAAACRAAKLQDCTMLVCGDDLVVICESAGTQEDAASLRVFTEAMTRYSAPPGDPPQPEYDLELITSCSSNVSVAHDASGKRVYYLTRDPTTPLARAAWETARHTPVNSWLGNIIMYGPTLWARMILMTHFFSNLLAQEYLDKALDCQIYEAIYSIGPLDLPQVIQRLHGLSAFSLHSYSPGEINRVASCLRKLGVPPLRVWRHRARSVRAKLLSQGGRAATCGKYLFNWAVKTKLKLTPIPAASQLDLSSWFVAGYSGGDIYHSLSRARPRWFMWCLLLLSVGVGIYLLPNR

SEQ ID NO: 1721 - protein, 3010 aa, Artificial
  HCV
MSTNPKPQRKTKRNTNRRPQDVKFPGGGQIVGGVYLLPRRGPRLGVRATRKTSERSQPRGRRQPIPKARRPEGRAWAQPGYPWPLYGNEGLGWAGWLLSPRGSRPSWGPTDPRRRSRNLGKVIDTLTCGFADLMGYIPLVGAPLGGTARALAHGVRVLEDGVNYATGNLPGCSFSIFLLALLPCLTIPASAYEVCNASGLYHVTNDCSNSSIVYEAEDMIMHTPGCVPCVRENNSSRCWVALTPTLAARNASIPTTTIRRHVDLLVGAAAFCSAMYVGDLCGSVFLVSQLFTFSPRRYETVQDCNCSIYPGHVSGHRMAWDMMMNWSPTTALVVSQLLRIPQAVVDMVAGAHWGVLAGLAYYSMVGNWAKVLIVMLLFAGVDGDTYTTGGAQGHTTSRVASLFTSGASQNIQLINTNGSWHINRTALNCNDSLQTGFIAALFYAHRFNSSGCPQRLASCRSIDKFAQGWGPITYTEGHNSDQRPYCWHYAPRPCGIVPASQVCGPVYCFTPSPVVVGTTDRFGAPTYNWGANETDVLLLNNTRPPQGNWFGCTWMNGTGFTKTCGGPPCNIGGAGNDTLTCPTDCFRKHPEATYAKCGSGPWLTPRCIVDYPYRLWHYPCTVNFSIFKVRMYVGGVEHRLTAACNWTRGERCDLEDRDRSELSPLLLSTTEWQILPCSFTTLPALSTGLIHLHQNIVDVQYLYGVGSAVVSFAIKWEYVLLLFLLLADARVCACLWMMLLVAQAEAALENLVVLNAASLAGVHGILSFLVFFCAAWYIKGKLVPGAAYALYGVWPLLLLLLALPPRAYAMDREMAASCGGVVFVGLALLTLSPYYKVFLARLIWWLQYLITRAEAQLQVWIPPLNVRGGRGAIILLTCVVHPELIFDITKIMLAILGPLMVLQAGIAKVPDFVRAQGVIRECILVRKVGGGQYVQMAFMKLAELKGTSVYDHLTPLQDWAHTGLRDLAVAVEPVVFSDMEIKIITWGGDTAACGDIIMGLPVSARRGREILLGPADSLEGQGWRLLAPITAYSQQTRGLFGCIITSLTGRDKNQVEGEVQVVSTATQSFLATCVNGVCWTVYHGAGSKTLAGPKGPITQMYTNVDQDLVGWPAPPGARSLTPCTCGGSDLYLVTRHADVIPVRRRGDSRGSLLSPRPISYLKGSSGGPLLCPSGHVVGIFRAAVCTRGVAKAVDFVPVESMETTMRSPVFTDNSSPPAVPQTFQVAHLHAPTGSGKSTKVPAAYAAQGYKVLVLNPSVTATLGFGAYMSKAHGVDPNIRTGVRTITTGAPITYSTYGKFLADGGCSGGAYDIIMCDECHSIDSTSILGIGTVLDQAETAGARLVVLATATPPGSVTVPHPNIEEIALSNTGEIPFYGKAIPIETIKGGRHLIFCHSKKKCDELAAKLSGLGLNAVAYYRGLDVSVIPASGDVVVVATDALMTGYTGDFDSVIDCNTCVTQTVDFSLDPTFTIETTTVPQDAVSRSQRRGRTGRGRRGIYRFVTPGERPSGMFDSSVLCECYDAGCAWYELTPAETSVRLRAYLNTPGLPFCQDHLEFWEGVFTGLTHIDAHFLSQTKQAGENLPYLVAYQATVCARAQAPPPSWDQMWKCLTRLKPTLHGPTPLLYRLGAVQNDVTLTHPITKYIMTCMSADLEVVTSTWVLVGGVLAALTAYCLTTGSVVIVGRIILSGKPAVIPDREALYQEFDEMEECASHLPYIEQGMQLAEQFKQKALGLLQTATNQAEAAAPVVESKWRALEAFWAKHMWNFISGIQYLAGLSTLPGNPAIASLMAFTASITSPLTTQSTLLFNILGGWVAAQLAPPRAVSAFVGAGIAGAAVGSIGLGKVLVDILAGYGAGVAGALVAFKVMSGEMPSTEDLVNLLPAILSPGALVVGVVCAAILRRHVGPGEGAVQWMNRLIAFASRGNHVSPTHYVPESDAAARVTQILSSLTITQLLRRLHQWINEDCSTPCSGSWLRDVWDWICTVLTDFKTWLQSKLLPRLPGVPFFSCQRGYRGVWRGDGIMQTTCPCGAQITGHVKNGSMRIVGPKTCSNTWHGTFPINAYTTGPCTPSPAPNYSRALWRVAAEEYVEVTRVGDFHYVTGMTTDNVKCPCQVPPPEFFTEVDGVRLHRNAPACGPLLREEVTFQVGLNQYLVGSQLPCEPEPDVAVLTSMLTDPSHITGETAKRRLARGSPPSLASSSASQLSAPSSKATYITQYDSPDFDLIEANLLWRQEMGGNITRVESENKVVTLDSFDPLRAEEDEREVSIPAEILRKSKKFPSALPIWARPDYNPPLLEPWKDPDYVPPVVHGCPLPPAKAPPIPPPRRKRTVVLTESTVSSALAELATKTFGSSESSAADRGTATAPPDQTSNDGDAGSDVESYSSMPPLEGEPGDPDLSDGSWSTVSEEAGEDVVCCSMSYTWTGALITPCAAEESKLPINALSNSLLRHHNMVYATTSRSASQRQKKVTFDRLQVLDDHYRDVLKEMKAKASTVKAKLLSVEEACRLTPPHSARSKFGYGAKDVRNLSSGAVNHIRSVWKDLLEDTETPIDTTIMAKNEVFCVQPEKGGRKPARLIVFPDLGVRVCEKMALYDVVSTLPQAVMGSSYGFQYSPGQRVEFLVNAWKSKKCPMGFAYDTRCFDSTVTESDIRVEESIYQCCDLAPEARQAIRSLTERLYIGGPLTNSKGQNCGYRRCRASGVLTTSCGNTLTCYLKASAACRAAKLQDCTMLVCGDDLVVICESAGTQEDAASLRVFTEAMTRYSAPPGDPPQPEYDLELITSCSSNVSVAHDASGKRVYYLTRDPTTPLARAAWETARSTPVNSWLGNIIMFAPTLWVRMILMTHFFSILLAQEQLEKALDCQIYGACYSIEPLDLPQIIQRLHGLSAFSLHSYSPGEINRVASCLRKLGVPPLRTWRHRARSVRAKLLSQGGRAATCGRYLFNWAVKTKLKLTPIPAASQLDLSNWFVAGYSGGDVYHSLSRARPRWFMLCLLLLSVGVGIYLLPNR

SEQ ID NO: 1722 - protein, 3010 aa, Artificial
  HCV
MSTNPKPQRKTKRNTNRRPQDVKFPGGGQIVGGVYLLPRRGPRLGVRATRKTSERSQPRGRRQPIPKARQPEGRAWAQPGYPWPLYGNEGMGWAGWLLSPRGSRPSWGPTDPRRRSRNLGKVIDTLTCGFADLMGYIPLVGAPLGGASRALAHGVRVLEDGVNYATGNLPGCSFSIFLLALLSCLTIPASAYEVRNASGVYHVTNDCSNASIVYEAADMIMHTPGCVPCVREANSSRCWVALTPTLAARNSSVPTTTIRRHVDLLVGAAAFCSAMYVGDLCGSVFLVSQLFTFSPRRHETVQDCNCSIYPGHVSGHRMAWDMMMNWSPTTALVVSQLLRIPQAVMDMVAGAHWGVLAGLAYYSMVGNWAKVLIVMLLFAGVDGRTTVTGGAQGHTTQRLASLFTFGAQQRIQLVNTNGSWHINRTALNCNDSLNTGFLAALFYTHRFNSSGCPERIASCRSIDAFAQGWGPITYAEPGSSDQRPYCWHYAPRPCGIVPASEVCGPVYCFTPSPVVVGTTDRSGAPTYSWGENETDVLLLNNTRAPQGNWFGCTWMNGTGFTKTCGGPPCNIGGVGNNTLTCPTDCFRKHPEATYTKCGSGPWLTPRCMVDYPYRLWHYPCTVNFTIFKVRMYVGGVEHRLNAACNWTRGERCDLEDRDRSELSPLLLSTTEWQILPCSFTTLPVLSTGLIHLHQNIVDVQYLYGVGSAVVSFVIKWEYILLLFLLLADARVCACLWMMLLIAQAEAALENLVVLNAASVAGAHGFLSFLVFFCAAWYIKGKLVPGAAYAFYGVWPLLLLLLALPPRAYAMDREMAASCGGAVFVGLALLTLSPHYKVVLARLIWWLQYFITRAEACLQVWIPPLNVRGGRDAIILLTCALHPELIFSITKILVAILGPLMVLQAGITKMPYFVRAQGLIRACMLVRKVAGGHYVQMAFMKLAALTGTYVYDHLTPLQDWAHAGLRDLAVAVEPVVFSDMETKIITWGADTAACGDIILGLAVSARRGKEIFLGPADSLEGSGWRLLAPITAYSQQTRGLLGCIITSLTGRDKNQVEGEVQVVSTATQSFLATCTNGVCWTVYHGAGSKTLAGSKGPITQMYTNVDQDLVGWQAPSGARSLTPCTCGSSDLYLVTRHADVIPVRRRGDGRGSLLSPRPVSYLKGSSGGPLLCPSGHAVGIFRAAVCTRGVAKAVDFIPVESMETTMRSPVFTDNSSPPAVPQTFQVAHLHAPTGSGKSNKVPVEYAAQGYKVLVLNPSVAATLGFGAYMSKAHGVDPNIRTGVRTITTGAPITYSTYGKFLADGGCSGGAYDIIICDECHSTDSTSILGIGTVLDQAETAGARLVVLATATPPGSVTVPHPNIEEVALSNIGEIPFYGKAIPIETIKGGRHLIFCHSKKKCDELAAKLSGLGINAVAYYRGLDVSVIPASGDVVVVATDALMTGFTGDFDSVIDCNTCVTQTVDFSLDPTFTIETTTVPQDAVSRSQRRGRTGRGRAGIYRFVTPGERPSGMFDSSVLCECYDAGCAWYELTPAETSVRLRAYLNTPGLPVWQDHLEFWESVFTGLTHIDAHFLSQTKQAGDNFPYLVAYQATVCARAQAPPPSWDQMWKCLIRLKPTLHGPTPLLYRLGAVQNEVILTHPITKYIMACMSADLEVVTSTWVLVGGVLAALAAYCLTTGSVVIVGRIILSGKPAIIPDREVLYREFDEMEECASHLPYIEQGMQLAEQFKQKALGLLQTATKQAEAAAPVVESKWQALETFWAKHMWNFISGIQYLAGLSTLPGNPAIASLMAFTASITSPLTTQHTLLFNILGGWVAAQLAPPRAASAFVGAGIAGAAVGSIGLGKVLVDILAGYGAGVAGALVAFKVMSGDMPSTEDLVNLLPAILSPGALVVGVVCAAILRRHVGPGEGAVQWMNRLIAFASRGNHVSPTHYVPESDAAARVTQILSSLTITQLLKRLHQWINEDCSTPCSGSWLRDVWDWICTVLTDFKTWLQSRVLPRLPGVPFLSCQRGYKGVWRGDGIMQTTCPCGAQITGHVKNGSMRIVGPKTCSNTWHGTFPINAYTTGPCTPSPAPNYSRALWRVAAEEYVEVTRVGDFHYVTGMTTDNLKCPCQVPAPEFFKELDGVRLHRYAPASKPLLRDEVTFQVGLNQYVVGSQLPCEPEPDVAVLTSMLTDPSHITAEAAKRRLARGSPPSLASSSASQLSAPSLKATCTTRHDSPDADLIEANLLWRQEMGGNITRVESENKVVILDSFEPLRAEEDEREVSLPAEILRKSRKFPPAMPIWARPDYNPPLIESWKDPDYVPPVVHGCPLPPTKAPPIPPPRRKRTVVLTESTVSSALAELATKTFGSSESSAADSGTATAPPDQPSNDGDAGSDVESYSSMPPLEGEPGDPDLSDGSWSTVSEEAGEDVVCCSMSYTWTGALITPCAAEESKLPINALSNSLLRHHNMVYATTSRSASQRQKKVTFDRLQVLDDHYRDVLKEMKAKASTVKARLLSVEEACKLTPPHSARSKFGYGAKDVRNLSSRAINHIRSVWKDLLEDTETPIDTTIMAKNEVFCVQPEKGGRKPARLIVFPDLGVRVCEKMALYDVVSTLPQAVMGPSYGFQYSPGQRVEFLVNAWKSKKCPMGFAYDTRCFDSTVTESDIRVEESIYQCCDLAPEARQAIRSLTERLYIGGPLTNSKGQNCGYRRCRASGVLTTSCGNTLTCYLKATAACRAAKLQDCTMLVCGDDLVVICESAGTQEDAASLRVFTEAMTRYSAPPGDPPQPEYDLELITSCSSNVSVAHDASGKRVYYLTRDPTTPLARAAWETARHTPVNSWLGNIIMYAPTLWARMILMTHFFSILLAQEQLEKALDCQIYGACYSIEPLDLPQIIQRLHGLSAFSLHSYSPGEINRVASCLRKLGVPPLRVWRHRARSVRAKLLSQGGRAAICGKYLFNWAVRTKLKLTPIPAASQLDLSGWFVAGYSGGDIYHSVSRARPRWFMWCLLLLSVGVGIYLLPNR

SEQ ID NO: 1723 - protein, 3010 aa, Artificial
  HCV
MSTNPKPQRQTKRNTNRRPQDVKFPGGGQIVGGVYLLPRRGPRLGVRATRKTSERSQPRGRRQPIPKVRRSEGRTWAQPGYPWPLYGNEGLGWAGWLLSPRGSRSNWGPTDPRRRSRNLGKVIDTLTCGFADLMGYIPVVGPPLGGVARALAHGVRVLEVGVNYATGNLPGCSFSIFLLALLSCLTIPASAYEVRNVSGVYHVTNDCSNSSIVYEAEDVIMHTPGCLPCVRENNSSRCWVALTPTLAGRNSSIPTTTIRRHVDLLVGAAAFCSAMYVGDLCGSVFLVSQLFAFSPRRYETVQDCNCSLYPGHITGHRMAWDMMMNWSPTTALVVSQLLRIPQAVMDMVAGAHWGVLAGLVYYSMVGNWAKVLIVMLLFVGVDGSTRVSGGTTAYNTRGLTSLFSSGAQQKIQLVNTNGSWHINRTALNCNDTLQTGFLAALFYTHRFNDSGCPERMASCRPIDKFAQGWGPITYAKPDILDQRPYCWHYAPRPCGIVPASEVCGPVYCFTPSPVVVGTTDRSGAPTYNWGGNETDVLLLNNTRPPQGNWFGCTWMNSTGFTKTCGGPPCNIGGAGNNTLTCPTDCFRKHPEATYTKCGSGPWLTPRCIVDYPYRLWYYPCTVNFTIFTIRMYVGGVEHRLKAACNWTRGERCNLEDRDRAELSPLLLSTTEWQILPCSFTTLPALSTGLIHLHQNIVDVQYLYGVGSAVVSVVIRWEYVLLLFLLLADARVCACLWMMLLIAQAEAALENLVILNAASVAGAHGILSFLVFFCAAWYIKGRLVPGAAYAFYGVWPLLLLLLSLPPRAYAMDREMAASCGGAVFIGLILLTLSPHYKAFLAKLIWWLQYFITRAEAHLQVWIPPLNVRGGRDAIILLTCAVHSELVFEITKILLAIFGPLMVLQAGLIRVPYFVRAQGLIRVCMLVRKVAGGHYVQMAFVKLAALTGTYVYNHLTPLQDWAHTGLRDLAVAVEPVVFSDMETKIITWGADTAACGDIISGLPVSARRGREILLGPADSFEGQGWRLLAPITAYSQQTRGLLGCIITSLTGRDKNQVEGEVQVVSTATQSFLATCVNGVCWTVYHGAGSKTLAGPKGPITQMYTNVDQDLVGWQAPPGARSLTPCTCGSSDLYLVTRHADVIPVRRRGDSRGSLLSPRPVSYLKGSSGGPLLCPSGHAVGIFRAAVCTRGVAKAVDFVPVESMETTMRSPVFTDNSSPPAVPQTFQVAHLHAPTGSGKSTKVPAAYAAQGYKVLVLNPSVAATLGFGAYMSKAHGVDPNIRTGARTITTGAPITYSTYGKFLADGGCSGGAYDIIICDECHSTDSTSILGIGTVLDQAETAGARLVVLATATPPGSVTVPHPNIEEVALSNTGEIPFYGKAIPLDTIKGGRHLIFWHSKKKCDELATKLSALGVNAVAYYRGLDVSVIPTSGNVVVVATDALMTGYTGDFDSVIDCNTCVIQTDDFSLDPTFTIETRTVPQDAVSRSQRRGRTGRGRRGIYRFVTPGERTSGMFDSSVLCECYDAGCAWYELTPAETSVRLRAYLNTPGLPVCQDHLEFWESVFTGLTHIDAHFLSQTKQAGDNFPYLVAYQATVCARAQAPPPSWDQMWKCLTRLKPTLHGPTPLLYRLGAVQNEVILTHPITKFIMACMSADLEVVTSTWVLVGGVLAALAAYCLTTGSVVIVGRIILSGKPAVIPDREVLYREFDEMEECASHLPYIEQGMQLAEQFKQKALGLLQTATKQAEAAAPVVESKWRTLEVFWAKHMWNFISGIQYLAGLSTLPGNPAIASLMAFTASITSPLTTQHTLLFNILGGWVAAQLAPPRAASAFVGAGIAGAAVGSIGLGKVLVDILAGYGAGVAGALVDFKVMSGEMPSAEDIVNLLPAILSPGALVVGVVCAAILRRHVGPGEGAVQWMNRLIAFASRGNHVSPTHYVPESDAAVRVTQILSSLTITQLLKRLHQWISEDCSTPCSGSWLRDVWDWICTVLTDFKTWLQSKLLPRLPGIPFFSCQRGYKGVWRGDGVMHTICPCGAQIAGHFKNGSMKIVGPKTCSNTWDGTFPINGYTTGSSTPTPASNYSKALWRVVFEEYVEVTRVGDFHYVTGMTTDNVKCPCQVPPPEFFTELDGVRLHRYAPVSKPLLRDEVTFQVGLNRYAVGSQLPCEPEPDVTVITSMLTDPSHITAETAKRRLARGSPPSLASSSASQLSAPSLKATCTTCHDSPDADLIEANLLWRQEMGGNITRVESENKVVILDSFDPLRAEEDEREVSVAAEILRKTKKFPPALPIWARPDYNPPLLESWRAPDYAPPVVHGCPLPPAKDPPIPPPRRKRTVVLTESTVSSALAELATKTFGSSGSSAVDSGTATAPPDQPSNDGDTGSDVGSYSSMPPLEGEPGDPDLSDGSWSTVSEEAGEDVVCCSMSYTWTGALITPCAAEESKLPINALSNSLLRHHNMVYATTSRSASQRQRKVTFDRLQVLDDHYRDVLKEMKAKASTVKAKLLSVEEACKLTPPHSAKSKFGYGGKDVRNLSSKAVNHIRSVWKDLLEDTETPIDTTVMAKNEVFCVQPEKGGRKAARLIVFPDLGVRVCEKMALYDVVSTLPQAVMGSSYGFQYSPGQRVEFLVNAWKSKKSPMGFAYDTRCFDSTVTENDIRVEESIYQCCDLAPEARQVIRSLTERLYIGGPLTNSKGQNCGYRRCRASGVLTTSCGNTLTCYLKAAAACRAAKLQDCTMLVCGDDLVVICESAGTQGDAASLRVFTEAMTRYSAPPGDPPQPEYDLELITSCSSNVSVAHDASGKRVYYLTRDPTTPLARAAWETARHTPVNSWLGNIIMYGPTLWARMILMTHFFSNLLAQEYLDKALDCQIYEAIYSIGPLDLPQVIQRLHGLSAFSLHSYSPGEINRVASCLRKLGVPPLRVWRHRARSVRAKLLSQGGRAATCGKYLFNWAVKTKLKLTPIPAASQLDLSSWFVAGYSGGDIYHSLSRARPRWFMWCLLLLSVGVGIYLLPNR

SEQ ID NO: 1724 - protein, 3010 aa, Artificial
  HCV
MSTNPKPQRKTKRNTNRRPQDVKFPGGGQIVGGVYLLPRRGPRLGVRATRKTSERSQPRGRRQPIPKARQPEGRAWAQPGYPWPLYANEGLGWAGWLLSPRGSRPSWGPTDPRRRSRNLGKVIDTPTCGFADLMGYIPLVGAPLGGVARALAHGVRVLEDSVNYATGNLPGCSFSIFLLALLSCLTVPASAYEVRNVSGIYHVTNDCSNSSIVYEAADLIMHTPGCVPCVREANSSRCWVALTPTLAARDSSIPTATIRRHVDLLVGAAAFCSAMYVGDLCGSVFLVSQLFTFSPRLHQTVQDCNCSIYPGHLTGHRMAWDMMMNWSPTAALVVSQLLRIPQAIVDMVAGAHWGVLAGLAYYPMVGNWAKVLIVMLLFAGVDGTTVTMGGTVARTTYGFTGLFRPGASQKIQLINTNGSWHINRTALNCNDSLNTGFLAALFYTHRFNASGCPERMASCQSIDKFVQGWGPITYAENGSSDQRPYCWHYAPRRCGIVPASQVCGPVYCFTPSPVVVGTTDRSGAPTYSWGENETDVLLLNNTRPPQGNWFGCTWMSSTGFTKTCGGPPCNIGGAGNNTLTCPTDCFRKHPEATYTKCGSGPWLTPRCLVDYPYRLWHYPCTVNFTTFKVRMYVGGVEHRLIAACNWTRGERCNLEDRDRSELSPLLLSTTEWQILPCSYTTLPALSTGLIHLHQNIVDVQYLYGIGSAVVSFVIKWEYVLLFFLLLADARVCACLWMILLIAQAEAALENLVVLNAASVAGAHGILSFLVFFCAAWYIKGRLVPGAAYASYGVWPLLLLLLALPPRAYAMDQGMAASSGGTVLVGLMLLTLSPYYKVVLARLIWWLQYFITRAEAHLQVWVPPLNVRGGRDAVILLTCAVYPELVFDITKLLLAIFGPLMVLQAGIIKMPYFVRAQGLIRACMLVRKVAGGHYVQMAFMKLAALTGTYVYDHLTPLRDWAHTGLRDLAVAVEPVVFSDMETKIITWGADTAECGDIILGYRSSARRGREILLGPADSLEGQGWRLLAPITAYAQQTRGLLGCIITSLTGRDKNQVEGEVQVVSTATQSFLATCVNGVCWTVFHGAGSKTLAGPKGPITQMYTNVDQDLVGWQAAPGMRSLTPCTCGSSDLYLVTRHADVIPVRRRGDGRGSLLSPRPVSYLKGSSGGPLLWPSGHAVGIFRAAVCTRGVAKAVDFVPVESMETTMRSPVFTDNSSPPAVPQTFQVAHLHAPTGSGKSTKVPAAYAAQGYKVLVLNPSVAATLGFGAYMSKAHGTDPNIRTGARTITTGAPITYSTYGKFFADGGCSGGAYDIIICDECHSTDSTTILGIGTVLDRAETAGARLVVLATATPPGSTTVPHPNIEEVALPNTGEIPFYGRAIPIEFIKGGRHLIFCPSKKKCDELAAKLSALGINAVAYYRGLDVSVIPTSGDVVVVATDALMTGYTGDFDSVIDCNTCVTQTVDFSLDPTFTIETTTVPQDAVSRTQRRGRTGRGRGGIYRFVTPGERPSGMFDSSVLCECYDAGCAWYELTPAETTVRLRAYLNTPGLPVCQDHLEFWESVFTGLNHIDAHFLSQTKQAGDNFPYLVAYQATVCARAQAPPPSWDQMWKCLIWLKPVLHGPTPLLYRLGAVQNEITLTHPITKLIMASMSADLEVVTSTWVLVGGVLAALAAYCLTTGSVVIVGRIILSGRPAVIPDREVLYREFDEMEECASHLPYIEQGVQLAEQFKQKALGLLQTATKQAEAAAPVVESKWRALETFWAKHMWNFISGIQYLAALSTLPGNPAIASLMAFTASITSPLTTQNTLLFNILGGWVAAQLAPASAASAFVGAGSAGAAIGTIGLGKVLVDILAGYGAGVAGALVAFKVMSGEMPSTEDLVNLLPAILSPGALVVGVVCAAILRRHVGPGEGAVQWMNRLIAFASRGNHDSPTHYVPESDAAARVTQILSSLTITQLLKRLHQWINEDCSTPCSGSWLRDVWDWICTVLTDFKTWLQSKLLPRLPGVPFFSCQRGYKGVWRGDGIMQTTCPCGAQITGHVKNGSMRIVGPKTCSNTWHGTFPINAYTTGPCTPAPTPNYSRALWRVAAEEYVEVTRVGDFHYVTGMTTDNVKCPCQVPAPEFFTEVDGVRLHRYAPACKTLLREEVTFQVGLNQYLVGSQLPCEPEPDVAVLTSMLTDPSHITAETAKRRLARGSPPSLASSSASQLSAPSLKATCTTHHDSPDADLIEANLLWRQEMGGNITRVESESKVVILDSFDPLRAEEGEGEVSVAAEILRKSKKFPPALPEWARPDYNPPLLESWKDPDYVPPVVHGCPLPPAKAPPIPPPRRKRTVVLTESTVSSALAELAVKTFGSSESSAVDSGTATAPPDQVSDNGDKGSDAESYSSMPPLEGEPGDPDLSDGSWSTVSEEASEDVVCCSMSYSWTGALITPCAAEESKLPINALSNSLLRHHNMVYATTSRSAGLRQKKVTFDRLQVLDDHYRDVLKEMKAKASTVKAKLLSVEEACKLTPPHSAKSKFGYGAKDVRNLSSRAVNHIRSVWKDLLEDTETPIDTTIMAKSEVFCVQPEKGGRKPARLIVFPDLGVRVCEKMALYDVVSTLPQAVMGPSYGFQYSPGQRVEFLVNAWKSKKCPMGFSYDTRCFDSTVTESDIRTEESIYQCCDLAPEAKQAIKSLTERLYIGGPLTNSKGQNCGYRRCRASVVLTTSCGNTLTCYLKASAACRAAKLQDCTMLVNGDDLVVICESAGTQEDAANLRAFTEAMTRYSAPPGDPPQPEYDLELITSCSSNVSVAHDASGKRVYYLTRDPTTPLARAAWETARHTPVNSWLGNIIMYAPTLWARMILMTHFFSILLAQEQLEKALECQIYGACYSIEPLDLPQIIERLHGLSAFSLHSYSPGEINRVASCLRKLGVPPLRVWRHRARRVRAKLLSQGGRAATCGKYLFNWAVRTKLKLTPIPAASRLDLSSWFVAGYSGGDIYHSVSHARPRWFMLCLLLLSVGVGIYLLPNR

SEQ ID NO: 1725 - protein, 3013 aa, Artificial
  HCV
MSTNPKPQRKTKRNTNRRPQEVKFPGGGQIVGGVYLLPRRGPRLGVRAIRKTSERSQPRGRRQPIPKARRPEGRAWAQPGYPWPLYGNEGMGWAGWLLSPRGSRPSWGPTDPRRRSRNLGKVIDTLTCGLADLMGYVPLVGGPLGGAARALAHGVRVLEDGVNYATGNMPGCSFSIFLLALLSCLTVPASAHEVRNASGVYHVTNDCSNSSIVFEAADLIMRTPGCVPCVREGNSSRCWVALTPTLAARNATIHTTTIRHHVDLLVGAAALCSAMYVGDLCGSVFLVSQLFTFSPRRHATLQDCNCSIYPGHASGHRMAWDMMMNWSPTTALVVSQLLRIPQAVIDMVAGAHWGVLAGLAYYSMAGNWAKVLIVMLLFAGVDGHTLTTGGHAAHLTSGFAGLFTPGPSQRIQLINTNGSWHINRTALNCNDSLQTGFLAALSYTYRFNSSGCPGRMASCRSIDKFDQGWGPITYADPKDPDQRPYCWHYAPQQCGIIPRSEACGPVYCSTPSPVVVGTTDRFGAPTYNWGDNETDVLLLNNTRPPQGNWFGCTWMNSTGFTKTCGAPPCNIGGVGNNTLTCPTDCFRKHPEATYSKCGSGPWLTPRCMVDYPYRLWHYPCTVNFSIFKVRMYVGGVEHRLNAACNWTRGERCDLDDRDRSELSPLLLSTTEWQVLPCSFTTLPALSTGLIHLHQNIVDVQYLYGIGSAVVSFAIKWEYVVLLFLLLADARVCACLWMMLLIARAEAALENLVALNAASVAGAHGILSFLVFFCAAWYIKGRLVPGAAYAFYGAWPLLLLLLTLPPRAYAMDREMAASCGGAVFVGLALLTLSPYYKVFLARLIWWLQYLIARAEAHLHVWVPPLNVRGGRDAIILLTCAVHPELIFDITKLLIAILGPLMVLQAGITRVPYFVRAQGLIRACMLVRKVAGGHYVQMAFMRLGALTGTYVYNHLTPLRDWAHAGLRDLAVAVEPVTFSDMETKIITWGADTAACGDIILGLPVSARRGREILLGPADSLVGQGWRLLAPITAYSRQTRGLLGCIITSLTGRDKNQVEGEVQVVSTATQSFLATCVNGVCWTVYHGAGSKTLAGPKGPIAQMYTNVDQDLVGWPAPPGARSLTPCTCGSSDLYLVTRHADVIPVRRRGDNRGSLLSPRPVSYLKGSSGGPLLCPSGHAVGVFRAAVCTRGVAKAVDFVPVESMETTMRSPVFTDTSSPPAVPQTFQVAHLHAPTGSGKSTRVPAAYATQGYKVLVLNPSVAATLGFGAYMSKAHGTDPNIRTGVRTITTGAPITYSTYGKFLADGGCSGGAYDIIMCDECHSTDSTTILGIGTVLDQAETAGARLVVLATATPPGSVTVPHPNIEEVALSNTGEIPFYGKAIPIEAIMGGRHLIFCHSKKKCDELAAKLSGLGINAVAYYRGLDVSVIPTSGDVVVVATDALMTGYTGDFDSVIDCNTCVTQTVDFSLDPTFTIETTTVPQDAVSRSQRRGRTGRGRGGIYRFVTPGERPSGMFDSPVLCECYDAGCAWYELTPAETSVRLRAYLNTPGLPVCQDHLEFWESVFTGLTHIDAHFLSQTKQAGDNFPYLVAYQATVCARAQAPPPSWDQMWKCLIRLKPTLHGPTPLLYRLGAVQNEVTLTHPITKYIMACMWADLEVVTSTWVLVGGVLAALAAYCLTTGSVVIVGRIILSGRPAVVPDREVLYREFDEMEECASHLPYIEQGMQLAEQFKQKALGLLQTATKQAEAAAPVVGSKWRAFETFWAKHMWNFISGIQYLAGLSTLPGNPAIASLMAFTASITSPLTTQNTLLFNILGGWVAAQLAPPSAASAFVGAGIAGAAVGSIGLGKVLVDILAGYGAGVAGALVAFKVMSGEAPSAEDLINLLPAILSPGALVVGVVCAAILRRHVGPGEGAVQWMNRLIAFASRGNHVSPTHYVPESDAAARVTQVLSSLTITQLLKRLHQWINEDCSTPCSGSWLRDVWDWVCTVLSDFKTWLQSKLLPRLPGVPFLSCQRGYKGVWRGDGIMHTTCPCGAQIAGHVKNGSMRIIGPKTCSNTWHGTFPINAYTTGPCTPSPAPNYSKALWRVAAEEYVEVTRVGDFHYVTGITTDNVKCPCQVPAPEFFTEVDGVRLHRYAPVCKPLLRDEVVFQVGLNQYLVGSQLPCEPEPDVAVLTSMLTDPSHITAEAAKRRLARGSPPSLASSSASQLSAPSLRATCTTHSSYNLDSPDVDLIEANLLWRQEMGGNITRVESENKVVVLDSFEPLRAEGDENEISIAAEILRKSKKFPAAIPIWARPDYNPPLLESWKNPDYVPPVVHGCPLPPVKAPPIPPPRRKRTVVLTDSTVSSVLAELATKTFGSSELSAADSGTATAPPDQTSDNGGKDSDAESCSSMPPLEGEPGDPDLSDGSWSTVSEEAGESVVCCSMSYTWTGALITPCAAEESKLPINALSNSLLRHHNMVYATTSRSAGLRQKKVTFDRLQVLDDHYRDVLKEMKAKASTVKAKLLSIEEACRLTPPHSAKSKFGYGAKDVRNLSSRAINHFRSVWEDLLEDTVTPIDTTVMAKNEVFCVQPEKGGQKPARLIVFPDLGVRVCEKMALYDVVSTLPQAVMGSSYGFQYSPGQRVEFLVKAWKSKKNPMGFSYDTRCFDSTVTENDIRVEESIYQCCDLAPEARQAIKSLTERLYIGGPLTNSKGQSCGYRRCRASGVLTTSCGNTLTCYLKASAACRAAKLQDCTMLVNGDDRVVICESAGTQEDAASLRVFTEAMTRYSAPPGDLPQPEYDLELITSCSSNVSVAHDASGKRVYYLTRDPTTPIARAAWETARHTPVNSWLGNIIMYAPTLWARMILMTHFFSILLAQEQLEKALDCQIYGACYSIEPLDLPQIIERLHGLSAFSLHSYSPGEINRVASCLRKLGVPPLRVWRHRARNVRAKLLSQGGRAATCGKYLFNWAVKTKLKLTPIPAASQLDLSGWFVAGYSGGDIYHSLSRARPRWFMLCLLLLSVGVGIYLLPN

SEQ ID NO: 1726 - protein, 3018 aa, Artificial
  HCV
MSTLPKPQRKTKRNTNRRPMDVKFPGGGQIVGGVYLLPRKGPRLGVRATRKTSERSQPRGRRQPIPKARQPQGRHWAQPGYPWPLYGSEGCGWAGWLLSPRGSRPHWGPNDPRRRSRNLGKVIDTLTCGFADLMWYIPVVGAPLGGVAAALAHGVRAIEDGINYATGNLPGCSFSIFLLALLSCLTTPASALTYGNSSGLYHLTNDCSNSSIVLEADAMILHLPGCLPCVRVGNQSTCWHAVSPTLATPNASTPATGFRRHVDLLAGAAVVCSSLYIGDLCGSLFLAGQLFAFQPRRHWTVQDCNCSIYTGHVTGHKMAWDMMMNWSPTTTLVLSSILRVPEICASVIFGGHWGILLAVAYFGMAGNWLKVLAVLFLFAGVEAQTMIAHGVSQTTSGFASLLTPGAKQNIQLINTNGSWHINRTALNCNDSLQTGFLASLFYTHKFNSSGCPERMAACKPLAEFRQGWGQITHKNVSGPSDDRPYCWHYAPRPCEVVPARSVCGPVYCFTPSPVVVGTTDKRGNPTYTWGENETDVFMLESLRPPTGGWFGCTWMNSTGFTKTCGAPPCQIVPGNYNSSANELLCPTDCFRKHPEATYQRCGSGPWVTPRCLVDYAYRLWHYPCTVNFTLHKVRMFVGGTEHRFDVACNWTRGERCELHDRNRIEMSPLLFSTTQLSILPCSFSTMPALSTGLIHLHQNIVDVQYLYGVSTNVTSWVVKWEYIVLMFLVLADARICTCLWLMLLISTVEAAVERLVVLNAASAAGTAGWWWAVLFLCCVWYVKGRLVPACTYMALGMWPLLLTILALPPRAYAMDNEQAASLGAVGLLVITIFSITPMYKKLLNCFIWWNQYFLARAEAMVHEWVPDLRVRGGRDSIILLTCLLHPQLGFEVTKILLAVLAPLYILQYSLLKVPYFVRAHILLRACLLVRRLAGGKYVQACLLRLGAWTGTFVYDHLAPLSDWASDGLRDLAVAVEPVIFSPMEKKIITWGADTAACGDILSGLPVSARLGNLVLLGPADDMQRGGWKLLAPITAYAQQTRGLVGTIVTSLTGRDKNEVEGEVQVVSTDTQSFVATSINGVMWTVYHGPGFKTLAGPKGPVCQMYTNVDLDLVGWPSPPGARSLTPCNCGSSDLYLVTREADVIPARRRGDSRAALLSPRPISTLKGSSGGPIMCPSGHVVGLFRAAVCTRGVAKSLDFIPVENMETTMRSPSFTDNSTPPAVPQTYQVGYLHAPTGSGKSTRVPAAYASQGYKVLVLNPSVAATLSFGSYMRQAYGVEPNIRTGVRTVTTGGAITYSTYGEFLADGGCSGGAYDIIICDECHSTDPTTVLGVGTVLDQAETAGVRLTVLPTATPPGSVTVPHPNITETALPTTGEIPFYGKAIPLEYIKGGRHLIFCHSKKKCDELAGKLKSLGLNAVAFYRGVDVSVIPTSGDVVVCATDALMTGYTGDFDSVIDCNVAVTQVVDFSLDPTFSIETTTVPQDAVSRSQRRGRTGRGKPGVYRFVSQGERPSGMFDTVVLCEAYDTGCAWYELTPSETTVRLRAYMNTPGLPVCQDHLEFWEGVFTGLTHIDAHFLSHTKQAGENFAYLVAYQATVCARAKAPPPSWDMMWKCLIRLKPTLTGPTPLLYRLGAVQNGVITTHPITKYIMTCMSADLEVITSTWVLVGGVLAALAAYCLSVGCVVICGRITLTGKPAVVPDREILYQQFDEMEECSRHIPYLAEGQQIAEQFRQKVLGLLQASAKQAEELKPAVHSAWPRVEDFWRKHMWNFVSGIQYLAGLSTLPGNPAVASLMSFTASLTSPLRTSQTLLLNILGGWIAAQVAPPPASTAFVVSGLAGAAVGSIRLGRVLVDVLAGYGAGVSGALVAFKIMSGECPSTEDMVNLLPALLSPGVALVGVVCAAILRRHVGPAEGANQWMNRLIAFASRGNHVSPTHYVPETDASKNVTQILTSLTITSLLRRLHQWVNEDTATPCATSWLRDVWDWVCTVLSDFKVWLQAKLFPRLPGIPFLSCQAGYRGVWAGDGVCHTTCTCGAVIAGHVKNGTMKITGPKTCSNTWHGTFPINATTTGPSTPRPAPNYQRALWRVSAEDYVEVRRLGDCHYVVGVTAEGLKCPCQVPAPEFFTEVDGVRIHRYAPPCKPLLRDEVTFSVGLSNYAVGSQLPCEPEPDVTVVTSMLTDPTHITAETAARRLKKGSPPSLASSSANQLSAPSLRATCTTSQKHPEMELLQANLLWKHEMGSHIPRVQSENKVVVLDSFELYPLEYEEREISVSVECHRQPRCKFPPVFPVWARPDNNPPFIQAWQMPGYEPPVVSGCAVAPPKPAPVPPPRRKRLVHLDESTVSHALAQLADKVFVESSNDPGPSSDSGLSITSPVPPDPTTPEDAGSEAESYSSMPPLEGEPGDPDLSSGSWSTVSDEDDVVCCSMSYSWTGALITPCAAEEEKLPINPLSNSLVRHHNMVYSTTSRSASLRQKKVTFDRVQVFDQHYQDVLKEIKLRASTVQAKLLSIEEACDLTPSHSARSKYGYGAQDVRSRASKAVDHIPSVWEGLLEDSDTPIPTTIMAKNEVFCVDPSKGGRKPARLIVYPDLGVRVCEKMALYDVTQKLPQAVMGPAYGFQYSPNQRVEYLLKMWRSKKVPMGFSYDTRCFDSTVTERDIRTENDIYQSCQLDPVARRVVSSLTERLYVGGPMANSKGQSCGYRRCRASGVLPTSMGNTLTCYLKAQAACRAANIKDCDMLVCGDDLVVICESAGVQEDTASLRAFTDAMTRYSAPPGDAPQPTYDLELITSCSSNVSVAHEGNGKKYYYLTRDCTTPLARAAWETARHTPVNSWLGNIIMFAPTIWVRMVLMNHFFSILQSQEQLEKAFDFDIYGVTYSVSPLDLPAIIQRLHGMAAFSLHGYSPVELNRVGACLRKLGVLPSRAWRHRARAVRAKLIAQGGKAAICGKYLFNWAVKTKLKLTPLVSASKLDLSGWFVAGYDGGDIYHSVSQARPRFLLLGLLLLTVGVGIFLLPAR

SEQ ID NO: 1727 - protein, 3014 aa, Artificial
  HCV
MSTNPKPQRKTKRNTNRRPQDVKFPGGGQIVGGVYLLPRRGPKLGVRATRKNSERSQPRGRRQPIPKARRPTGRSWGQPGYPWPLYANEGLGWAGWLLSPRSSRPNWGPNDPRRKSPNLGRVIHTLTCGFPHLMGYIPLVGGPVGGVSRALAHGVKVLEDGINYATGNLPGCPFSIFVLALLWCLTVPASAVPYRNASGVYHVTNDCPNSSIVYEADNLILHAPGCVPCVLEDNVSRCWVQITPTLSAPSFGAVTALLRRAVDYLAGGAAFCSALYVGDACGALSLVGQMFTYKPRQHTTVQDCNCSIYSGHITGHRMAWDMMMKWSPTTALLMAQLLRIPQVVIDIIAGGHWGVLLAAAYFASTANWAKVILVLFLFAGVDGRTHTVGGTVGQGLKSLTSFFNPGPQRQLQFVNTNGSWHINSTALNCNDSLQTGFIAGLMYAHKFNSSGCPERMSSCRPLAAFDQGWGTISYATISGPSDDKPYCWHYPPRPCGVVPARDVCGPVYCFTPSPVVVGTTDRRGCPTYNWGSNETDILLLNNIRPPAGNWFGCTWMNSTGFVKNCGAPPCNLGPTGNNSLKCPTDCFRKHPDATYTRCGSGPWLTPRCLVHYPYRLWHYPCTVNYTIFKVRMFIGGLEHRLEAACNWTYGERCDLEDRDRAELSPLLHTTTQWAILPCSFTPTPALSTGLIHLHQNIVDTQYLYGLSSSIVSWAVKWEYIMLVFLLLADARICTCLLILLLICQAEATCKNVIVLNAAAAAGNHGFFWGLLVVCLAWHVKGRLVPGATYLCLGVWPLLLVRLLRPHRALALDSSDGGTVGCLVLIVLTIFTLTPGYKKKVVLVMWWLQYFIARVEAIIHVWVPPLQVKGGRDAVIMLTCLFHPALGFEITKILFGILGPLYLLQHSLTKVPYFLRARALLRLCLLAKHLVYGKYVQAALLHLGRLTGTYIYDHLAPMKDWAASGLRELTVATEPIVFSAMETKVITWGADTAACGNILAVLPVSARRGREIFLGPADDIKTSGWRLLAPITAYAQQTRGVLGAIVLSLTGRDKNEAEGEVQFLSTATQTFLGICINGVMWTLFHGAGSKTLAGPKGPVVQMYTNVDKDLVGWPSPPGKGSLTRCTCGSADLYLVTRHADVIPARRRGDTRASLLSPRPISYLKGSSGGPIMCPSGHVVGVFRAAVCTRGVAKALEFVPVENLETTMRSPVFTDNSTPPAVPHEFQVGHLHAPTGSGKSTKVPAAYAAQGYKVLVLNPSVAATFGFGAYMSRAYGVDPNIRTGVRTVTTGAGITYSTYGKFFADGGCSGGAYDVIICDECHSQDATTILGIGTVLDQAETAGARLVVLATAIPPGSVTTPHPNIEEVALPSEGEIPFYGRAIPLVLIKGGRHLIFCHSKKKCDELAKQLTSLGVNAVAYYRGLDVAVIPATGDVVVCSTDALMTGFTGDFDSVIDCNSAVTQTVDFSLDPTFTIETTTVPQDAVSRSQRRGRTGRGRHGIYRYVSSGERPSGIFDSVVLCECYDAGCAWYDLTPAETTVRLRAYLNTPGLPVCQEHLEFWEGVFTGLTNIDAHMLSQAKQGGENFPYLVAYQATVCVRAKAPPPSWDTMWKCMICLKPTLTGPTPLLYRLGAVQNEITLTHPITKYIMACMSADLEVITSTWVLVGGVVAALAAYCLTVGSVAIVGRIILSGRPAITPDREVLYQQFDEMEECSASLPYVDEARAIAGQFKEKVLGLIGTAGQKAETLKPAATSMWSKAEQFWAKHMWNFVSGIQYLAGLSTLPGNPAVATLMSFTAAVTSPLTTHQTLLFNILGGWVASQIAPPTAATAFVVSGMAGAAVGNIGLGRVLIDILAGYGTGVAGALVAFKIMCGERPTAEELVNLLPSILCPGALVVGVICAAVLRRHIGPGEGAVQWMNRLIAFASRGNHGSPTHYVPETDASAKVTQLLSSLTVTSLLKRLHTWIGEDYSTPCDGTWLRAIWDWVCTALTDFKAWLQAKLLPQLPGVPFFSCQKGYKGVWRGDGVNSTKCPCGATISGHVKNGTMRIVGPKLCSNTWQGTFPINATTTGPSVPAPAPNYKFALWRVGAADYAEVRRVGDYHYITGVTQDNLKCPCQVPSPEFFTELDGVRIHRFAPPCNPLLREEVTFSVGLHSYVVGSQLPCEPEPDVTVLTSMLSDPAHITAETAKRRLNRGSPPSLANSSASQLSAPSLKATCTIQGHHPDADLIKANLLWRQCMGGNITRVEAENKVEILDCFKPLKEEEDDREISVSADCFKKGPAFPPALPVWARPGYDPPLLETWKRPDYDPPQVWGCPIPPAGPPPVPLPRRKRKPMELSDSTVSQVMADLADARFKVDTPSIEGQDSALGTSSQHDSGPEEKRDDNSDAASYSSMPPLEGEPGDPDLSSGSWSTVSGEDNVVCCSMSYTWTGALITPCSAEEEKLPINPLSNTLLRHHNLVYSTSSRSAGLRQKKVTFDRLQVLDDHYREVVDEMKRLASKVKARLLPLEEACGLTPPHSARSKYGYGAKEVRSLDKKALKHIEGVWQDLLDDSDTPLPTTIMAKNEVFAVEPSKGGKKPARLIVYPDLGVRVCEKRALYDVAQKLPTALMGPSYGFQYSPAQRVDFLLKAWKSKKIPMAFSYDTRCFDSTITEHDIMTEESIYQSCDLQPEARVAIRSLTQRLYCGGPMYNSKGQQCGYRRCRASGVFTTSMGNTMTCYIKALASCRAAKLRDCTLLVCGDDLVAICESQGTHEDEASLRAFTEAMTRYSAPPGDPPVPAYDLELVTSCSSNVSVARDASGNRIYYLTRDPQVPLAKAAWETAKHSPVNSWLGNIIMYAPTLWARIVLMTHFFSVLQSQEQLEKTLAFEMYGSVYSVTPLDLPAIIQRLHGLSAFSLHSYSPSEINRVASCLRKLGVPPLRAWRHRARAVRAKLIAQGGRAAICGIYLFNWAVKTKRKLTPLADADRLDLSSWFTVGAGGGDIYHSMSRARPRNLLLCLLLLSVGVGIFLLPAR

SEQ ID NO: 1728 - protein, 3010 aa, Artificial
  HCV
MSTNPKPQRKTKRNTNRRPQDVKFPGGGQIVGGVYLLPRRGPRLGVRALRKTSERSQPRGRRQPIPKARRPEGRAWAQPGYPWPLYGNEGMGWAGWLLSPRGSRPSWGPSDPRRRSRNLGKVIDTLTCGFADLMGYIPLVGAPLGGAARALAHGVRVLEDGVNYATGNLPGCSFSIFLLGLLSCLTIPASAYEVRNVSGVYHVTNDCSNASIVYEAADMIMHVPGCVPCVRVDNSSRCWVALTPTLAARNASVPTTAIRRHVDLLVGAATFCSAMYVGDLCGSVFLVAQLFTFSPRRHETVQDCNCSIYPGHITGHRMAWDMMMNWSPTAALVVSQLLRIPQAIVDMVAGAHWGVLAGLAYYSMVGNWAKVLIVMLLFAGVDGDTHTTGGVAGRDTLRFTGFFSLGPKQKIQLVNTNGSWHINRTALNCNDSLNTGWLAALFYTHSFNASGCPERMASCHPIDEFAQGWGPITYAEHSSSDQRPYCWHYAPQPCGIVPASEVCGPVYCFTPSPVVVGTTDRHGVPTYSWGENGTDVLLLNNTRPPQGNWFGCTWMNGTGFTKTCGGPPCNIGGVGNNTLTCPTDCFRKHPEATYTKCGSGPWLTPRCMVDYPYRLWHYPCTVNFTIFKVRMYVGGVEHRLSAACNWTRGERCDLEDRDRSELSPLLLSTTEWQVLPCSFTTLPALSTGLIHLHQNIVDVQYLYGIGSVVVSFAIKWEYVVLLFLLLADARVCACLWMMLLIAQAEAALENLVVLNAASVAGAHGILSFLVFFCAAWYIKGRLVPGAAYAIYGVWPLLLLLLALPPRAYALDREMAASCGGAVFVGLVLLTLSPHYKEFLARLIWWLQYYITRAEALLQVWIPPLNVRGGRDAIILLTCVVHPELIFDITKLLLAMLGPPMVLQAVITKVPYFVRAQGLIRACMLVRKVAGGHYVQMALMKLAGLTSTYVYDHLTPLQDWAHGGLRDLAVAVEPVVFSDMETKIITWGADTAACGDIISGLPVSARRGREILLGPADSLKEQGWRLLAPITAYSQQTRGLLGCIITSLTGRDKNQVEGEVQVVSTATQSFLATCVNGVCWTVYHGAGSKTLAGPKGPVTQMYTNVDQDLVGWPAPPGARSLTPCTCGSSDLYLVTRHADVIPVRRRGDSRGSLLSPRPVSYLKGSSGGPLLCPSGHAVGIFRAAVCTRGVAKAVDFVPVESMETTMRSPVFTDNSSPPAVPETFQVAHLHAPTGSGKSTKVPAAYAAQGYKVLVLNPSVAATLGFGAYMSKAHGTDPNIRTGVRTITTGAPITYSTYGKFLADGGCSGGAYDIIICDECHSTDSTTILGIGTVLDQAETAGARLVVLATATPPGSVTVPHPNIEEVALSNIGEIPFYGKAIPIETIKGGRHLIFCHSKKKCDELAAKLSGLGLNAVAYYRGLDVSVIPTSGDVVVVATDALMTGFTGDFDSVIDCNTCVTQTVDFSLDPTFTIETTTVPQDAVSRSQRRGRTGRGRRGIYRFVTPGERPSGMFDSSVLCECYDAGCAWYELTPAETSVRLRAYLNTPGLPVCQDHLEFWESVFTGLTHIDAHFLSQTKQAGENFPYLTAYQATVCARAQAPPPSWDQMWKCLIRLKPTLHGPTPLLYRLGAVQNEVVLTHPITKYIMACMSADLEVVTSTWVLVGGVLAALAAYCLTTGSVVIVGRIILSGRPAIIPDREVLYQEFDEMEECASHLPYIEQGMQLAEQFKQKALGLLQTATKQAEAAVPVVESKWQALEAFWAKHMWNFISGIQYLAGLSTLPGNLAIASLMAFTASITSPLTTQHTLLFNILGGWVAAQLAPPSAASAFVGAGIAGAAVGSIGLGKVLVDILAGYGAGVAGALVAFKVMSGEMPSTEDLVNLLPAILSPGALVVGVVCAAILRRHVGPGEGAVQWMNRLIAFASRGNHVSPTHYVPESDAAARVTQILSSLTITQLLKRLHQWINEDCSTPCSGSWLRDVWDWICTVLTDFKTWLQSKLLPRLPGIPFYSCQRGYKGVWRGDGIMQTTCPCGAQITGHVKNGSMRIVGPKTCSNTWHGTFPINAYTTGPCTPSPAPNYSRALWRVAAEEYVEVTRVGDFHYVTGMTTDNVKCPCQVPAPEFFTEVDGVRLHRYAPACKPLLRDEVTFQVGLNQYVVGSQLPCEPEPDVVVVTSMLTDPSHITAETAKRRLDRGSPPSLASSSASQLSAPSLKATCTTRHDSPDADLIEANLLWRQEMGGNITRVESENKVVILDSFDPLRAEEDEREVSVAAEILRKSRRFPRAMPIWARPDYNPPLLESWKDPDYVPPVVHGCPLPPTKAPPIPPPRKKRTVVLTESTVSSALAELATKTFGSSESSAVDSGTATAPPDQPPDNDDTGSDVESCSSMPPLEGEPGDPDLSDGSWSTVSEEASEDVVCCSMSYTWTGALITPCAAEESKLPINALSNSLLRHHNMVYATTSRSASQRQKKVTFDRLQVLDDHYRDVLKEMKAKASTVKAKLLSVEEACKLTPPHSARSKFGYGAKDVRNLSSKAVNHIRSVWKDLLEDTETPIDTTIMAKNEVFCVQPEKGGRKPARLIVFPDLGVRVCEKMALYDVVSTLPQAVMGPSYGFQYSPGQRVEFLVNAWKSKKCPMGFAYDTRCFDSTVTESDIRVEESIYQCCDLAPEARQAIKSLTERLYIGGPLTNSKGQNCGYRRCRASGVLTTSCGNTLTCYLKASAACRAAKLQDCTMLVCGDDLVVICESAGTQEDAASLRVFTEAMTRYSAPPGDPPQPEYDLELITSCSSNVSVAHDASGKRVYYLTRDPTTPLARAAWETARHTPVNSWLGNIIMYAPTLWARMILMTHFFSILLAQEQLEKALDCQIYGACYSIEPLDLPQIIQRLHGLSAFSLHSYSPGEINRVASCLRKLGVPPLRAWRHRARSVRAKLLSQGGRAATCGRYLFNWAVKTKLKLTPIPAASQLDLSNWFVAGYSGGDIYHSLSRARPRWFMWCLLLLSVGVGIYLLPNR

SEQ ID NO: 1729 - protein, 3010 aa, Artificial
  HCV
MSTNPKPQRKTKRNTNRRPQDVKFPGGGQIVGGVYLLPRRGPRLGVRATRKTSERSQPRGRRQLIPKARQPEGRSWAQPGYPWPLYGNEGMGWAGWLLSPRGSRPSWGPTDPRRRSRNLGKVIDTLTCGFADLMGYIPLVGAPLGGAARALAHGVRVLEGGVNYATGNLPGCSFSIFLLALLSCLTIPASAYEVRNVSGVYHVTNDCSNSSIVYETADMIMHTPGCVPCVREDNSSRCWVALTPTLAARNASIPTTTIRRHVDLLVGAAAFCSAMYVGDLCGSVFLVSQLFTFSPRRHATVQDCNCSIYPGHVSGHRMAWDMMMNWSPTAALVVSQLLRIPQAVVDMVAGAHWGVLAGLAYYSMVGNWAKVLIVMLLFAGVDGTTTVTGGSQARTVYELTSLYTRGPSQRIQLVNTNGSWHINRTALNCNDSLQTGFLAALFYTRSFNSSGCPERMASCRSIDQFDQGWGPITYAEPRDLDQRPYCWHYAPRPCGIVPASQVCGPVYCFTPSPVVVGTTDRSGVPTYSWGENETDVLLLNNTRPPQGNWFGCTWMNSTGFTKTCGGPPCGIGGVGNNTLICPTDCFRKHPEATYTRCGSGPWLTPRCMVDYPYRLWHYPCTVNFTIFKVRMYVGGVEHRLNAACNWTRGERCDLEDRDRSELSPLLLSTTEWQVLPCSFTTLPALSTGLIHLHQNVVDVQYLYGIGSVVVSFAIKWEYILLLFLLLADARVCACLWMMLLIAQAEAALENLVVLNAASLAGTHGILSFLVFFCAAWYIKGRLVPGAAYALYGVWPLLLLLLALPPRAYALDREMAASCGGAVFVGLIILTLSPHYKAFLARLIWWLQYFITRAEALLQVWIPPLNVRGGRDAIILLTCAVHPGLIFDITRLLLAILGPLMVLQAGITRVPYFVRAHGLIRACMLVRKVAGGHYVQMAFMKLAALTGTYVYDHLTPLRDCRHAGLRDLAVAVEPVVFSAMETKIITWGADTAACGDIILGLPVSARRGREILLGPADSLEGQGWRLLAPITAYAQQTRGLLGCIITSLTGRDKNQVEGEVQVVSTATQSFLATCVNGVCWTVYHGAGSKTLAGPKGPVTQMYTNVDQDLVGWQAPPGARSLTPCTCGSSDLYLVTRHADVIPVRRRGDSRGSLLSPRPVSYLKGSSGGPLLCPSGHAVGIFRAAVCTRGVAKAVDFVPVESMETTMRSPVFTDNSSPPAVPQTFQVAHLHAPTGSGKTTKVPAAYAAQGYKVLVLNPSVAATLGFGAYMSKAHGIDPNIRTGVRTITTGAPITYSTYGKFLADGGCSGGAYDIIICDECHSTDSTSILGIGTVLDQAETAGARLVVLATATPPGSVTVPHSNIEEVALSNIGEIPFYGKAIPLENIKGGRHLIFCHSRKKCDELAAKLSGLGINAVAYYRGLDVSVIPTSGDVVVVATDALMTGYTGDFDSVIDCNVCVTQTVDFSLDPTFTIETTTVPQDAVSRSQRRGRTGRGRMGIYRFVTPGERPSGMFDSSVLCESYDAGCAWYELTPAEASVRLRAYLNTPGLPVCQDHLEFWESVFTGLTHIDAHFLSQTKQAGDNFPYLVAYQATVCARAQAPPPSWDQMWKCLIRLKPTLHGPTPLLYRLGAVQNEVTLTHPITKFIMACMSADLEVVTSTWVLVGGVLAALAAYCLTTGCVVIVGRIILSGRPAIVPDREVLYQEFDEMEECASHLPYIEQGMQLAEQFKQKALGLLQTATKQAEAAAPVVESKWRALEAFWAKHMRNFISGIQYLAGLSTLPGNPAIASLMAFTASITSPLTTQSTLLFDILGGWVAAQLAPPSAASAFVGAGIARAAVGSIGLGKVLVDILAGYGAGVAGALVAFKVMSGEVPSTEDLINLLPAILSPGALVVGVVCAAILRGHVGPGEGAVQWMNRLIAFAFAGNHVSPTHYVPESDAAARVTQILSSLTITQLLKRLHQWINEDCSTPCSGSWLRDVWDWICTVLTDFKTWLQSKLLPRLPGVPFLSCQRGYRGVWRGDGIMHTTCPCGAQMAGHVKNGSMRIVGPKTCSNTWYGSFPINAYTTGPCTPSPAPNYSRALWRVAAEEYVEVTRVGDFHYVTGMTTDNIKCPCQVPAPEFFTEVDGVRLHRYAPACKPLLRDEVSFQVGLNHYPVGSQLPCEPEPDVAVLTSMLTDPSHITAETAKRRLARGSPPSLASSSASQLSAPSLKATCTTRHDSPDADLIEAHLLWRQEMGGNITRVESENKVVILDSFDPLRAEEDEREVSVPAEILRKSRKFPPAMPIWARPDYNPPLLESWKDPDYVPPVVHGCPLPPTKAPPIPPPRRKRTVVLTESTVSSALAELATKTFGSSESSAVDSGTATAPPGQSSDDVDTGSDVESYSSMPPLEGEPGDPDLSDGSWSTVSEEANEDVVCCSMSYTWTGALITPCAAEESKLPINALSNSLLRHHNMVYATTSRSASQRQKKVTFDRQQVQDDHYRDVLKEMKAKASTVKARLLSVEEACKLTPPLSARSKFGYGAKDVRNLSSKAVNHIRSVWEDLLEDNVTPIDTTIMAKNEVFCVQPEKGGRKPARLIVFPDLGVRVCEKMALYDVVSTLPHTVMGSSYGFQYSPGQRVEFLVNTWKSKKCPMGFAYDTRCFDSTVTENDIRVEESIYQCCDLGPEARQAIRSLTERLYIGGPLTNSKGQNCGYRRCRASGVLTTSCGNTLTCYLKATAACRAAKLQDCTMLVCGDDLVVICESAGTQEDAANLRVFTEAMTRYSAPPGDPPQPEYDLELITSCSSNVSVAHDASGKRVYYLTRDPTTPLARAAWETARHTSVNSWLGNIIMYAPTLWARMILMTHFFSILLAQEQLEKALDCQIYGACYSIEPLDLPQIIQRLHGLSAFSLHSYSPGEINRVASCLRKLGVPPLRVWRHRARSVRAKLLSPGGEGSTCGKYLFNWAVRTKLKLTPIPAAFQLDLSGWFVAGYSGGDIYHSLSRARPRWFMWCLLLLSVGVGIYLLPNR

SEQ ID NO: 1730 - protein, 3011 aa, Artificial
  HCV
MSTNPKPQRKTKRNTNRRPQDVKFPGGGQIVGGVYLLPRRGPRLGVRATRKTSERSQPRGRRQPIPKARRPEGRTWAQPGYPWPLYGNEGCGWAGWLLSPRGSRPSWGPTDPRRRSRNLGKVIDTLTCGFADLMGYIPLVGAPLGGAARALAHGVRVLEDGVNYATGNLPGCSFSIFLLALLSCLTVPASAYQVRNSSGLYHVTNDCPNSSVVYEAADAILHTPGCVPCVREGNASRCWVAVTPTVATRDGKLPTTQLRRHIDLLVGSATLCSALYVGDLCGSVFLVGQLFTFSPRHHWTTQDCNCSIYPGHITGHRMAWNMMMNWSPTAALVVAQLLRIPQAIMDMIAGAHWGVLAGIKYFSMVGNWAKVLVVLLLFAGVDAETHVTGGNAGRTTAGLVGLLTPGAKQNIQLINTNGSWHINSTALNCNESLNTGWLAGLFYQHKFNSSGCPERLASCRRLTDFAQGWGPISYANGSGLDERPYCWHYPPRPCGIVPAKSVCGPVYCFTPSPVVVGTTDRSGAPTYSWGANDTDVFVLNNTRPPLGNWFGCTWMNSTGFTKVCGAPPCVIGGVGNNTLLCPTDCFRKYPEATYSRCGSGPRITPRCMVDYPYRLWHYPCTINYTIFKVRMYVGGVEHRLEAACNWTRGERCDLEDRDRSELSPLLLSTTQWQVLPCSFTTLPALSTGLIHLHQNIVDVQYLYGVGSSIASWAIKWEYVVLLFLLLADARVCSCLWMMLLISQAEAALENLVILNAASLAGTHGLVSFLVFFCFAWYLKGRWVPGAVYALYGMWPLLLLLLALPQRAYALDTEVAASCGGVVLVGLMALTLSPYYKRYISWCMWWLQYFLTRVEAQLHVWVPPLNVRGGRDAVILLTCVVHPALVFDITKLLLAIFGPLWILQASLLKVPYFVRVQGLLRICALARKIAGGHYVQMAIIKLGALTGTCVYNHLAPLRDWAHNGLRDLAVAVEPVVFSRMETKLITWGADTAACGDIINGLPVSARRGQEILLGPADGMVSKGWRLLAPITAYAQQTRGLLGCIITSLTGRDKNQVEGEVQIVSTATQTFLATCINGVCWTVYHGAGTRTIASPKGPVIQTYTNVDQDLVGWPAPQGSRSLTPCTCGSSDLYLVTRHADVIPVRRRGDSRGSLLSPRPISYLKGSSGGPLLCPTGHAVGLFRAAVCTRGVAKAVDFIPVENLETTMRSPVFTDNSSPPAVPQSFQVAHLHAPTGSGKSTKVPAAYAAKGYKVLVLNPSVAATLGFGAYMSKAHGVDPNIRTGVRTITTGSPITYSTYGKFLADAGCSGGAYDIIICDECHSTDATSISGIGTVLDQAETAGARLVVLATATPPGSVTVSHPNIEEVALSTTGEIPFYGKAIPLEVIKGGRHLIFCHSKKKCDELAAKLVALGINAVAYYRGLDVSVIPTSGDVVVVSTDALMTGFTGDFDSVIDCNTCVTQTVDFSLDPTFTIETTTLPQDAVSRTQRRGRTGRGKPGIYRFVAPGERPSGMFDSSVLCECYDAGCAWYELTPAETTVRLRAYMNTPGLPVCQDHLGFWEGVFTGLTHIDAHFLSQTKQSGENFPYLVAYQATVCARAQAPPPSWDQMRKCLIRLKPTLHGPTPLLYRLGAVQNEVTLTHPITKYIMTCMSADLEVVTSTWVLVGGVLAALAAYCLSTGCVVIVGRIVLSGKPAIIPDREVLYQEFDEMEECSQHLPYIEQGMMLAEQFKQKALGLLQTASRHAEVITPAVQTNWQKLEVFWAKHMWNFISGIQYLAGLSTLPGNPAIASLMAFTAAVTSPLTTGQTLLFNILGGWVAAQLAAPGAATAFVGAGLAGAALDSVGLGKVLVDILAGYGAGVAGALVAFKIMSGEVPSTEDLVNLLPAILSPGALAVGVVFASILRRRVGPGEGAVQWMNRLIAFASRGNHVSPTHYVPESDAAARVTAILSSLTVTQLLRRLHQWISSECTTPCSGSWLRDIWDWICEVLSDFKTWLKAKLMPQLPGIPFVSCQRGYRGVWRGDGIMHTRCHCGAEITGHVKNGTMRIVGPRTCKNMWSGTFFINAYTTGPCTPLPAPNYKFALWRVSAEEYVEIRRVGDFHYVSGMTTDNLKCPCQIPSPEFFTELDGVRLHRFAPPCKPLLREEVSFRVGLHEYPVGSQLPCEPEPDVAVLTSMLTDPSHITAEAAGRRLARGSPPSMASSSASQLSAPSLKATCTANHDSPDAELIEANLLWRQEMGGNITRVESENKVVILDSFDPLVAEEDEREVSVPAEILRKSRRFAPALPVWARPDYNPLLVETWKKPDYEPPVVHGCPLPPPRSPPVPPPRKKRTVVLTESTLPTALAELATKSFGSSSTSGITGDNTTTSSEPAPSGCPPDSDVESYSSMPPLEGEPGDPDLSDGSWSTVSSGADTEDVVCCSMSYSWTGALVTPCAAEEQKLPINALSNSLLRHHNLVYSTTSRSACQRKKKVTFDRLQVLDSHYQDVLKEVKAAASKVKANLLSVEEACSLAPPHSAKSKFGYGAKDVRCHARKAVAHINSVWKDLLEDSVTPIDTTIMAKNEVFCVQPEKGGRKPARLIVFPDLGVRVCEKMALYDVVSKLPLAVMGSSYGFQYSPGQRVEFLVQAWKSKKTPMGLSYDTRCFDSTVTESDIRTEEAIYQCCDLDPQARVAIKSLTERLYVGGPLTNSRGENCGYRRCRASRVLTTSCGNTLTRYIKARAACRAAGLQDCTMLVCGDDLVVICESAGVQEDAASLRAFTEAMTRYSAPPGDPPQPEYDLELITSCSSNVSVAHDGAGKRVYYLTRDPTTPLARAAWETARHTPVNSWLGNIIMFAPTLWARMILMTHFFSVLIARDQLEQALNCEIYGACYSIEPLDLPPIIQRLHGLSAFSLHSYSPGEINRVAACLRKLGVPPLRAWRHRAWSVRARLLARGGKAAICGKYLFNWAVRTKLKLTPITAAGRLDLSGWFTAGYSGGDIYHSVSHARPRWFWFCLLLLAAGVGIYLLPNR

SEQ ID NO: 1731 - protein, 3023 aa, Artificial
  HCV
MSTLPKPKRQTKRNTLRRPKNVKFPAGGQIVGEVYVLPRRGPQLGVREVRKTSERSQPRGRRQPTPKARPREGRSWAQPGYPWPLYGNEGCGWAGWLLPPRGSRPSWGQNDPRRRSRNLGKVIDTLTCGFADLMGYIPLIGAPVGGVARALAHGVRALEDGVNYATGNLPGCSFSIFLLALFSCLTCPASSLEYRNASGLYLLTNDCSNRSIVYEADDVILHLPGCVPCVETDNNNTSCWTPISPTVAVKHPGVTTASIRNHVNMLVAPPTLCSALYVEDAFGAVSLVGQAFTFRPRQHKTVQTCNCSIYPGHVSGHRMAWDMMMNWSPAIGLVISHLMRLPQTFFDLVVGAHWGVMAGLAYFSMQGNWAKVVIVLIMFSGVDATTHTTGGSAAQATAGFTSFFTRGPSQNLQLVNSNGSWHINSTALNCNDSLNTGFIAGLFYYHKFNSSGCPERMSSCKPITYFNQGWGPLTDANINGPSEDRPYCWHYPPRPCNITKPLNVCGPVYCFTPSPVVVGTTDIKGLPTYRFGVNESDVFLLTSLRPPQGRWFGCVWMNSTGFVKTCGAPPCNIYGGMKDIEANQTHLKCPTDCFRKHHDATFTRCGSGPWLTPRCLVDYPYRLWHYPCTVNFSIFKVRMFVGGHEHRFSAACNWTRGERCDLEDRDRSEQQPLLHSTTDSLILPCSFTPMRRLSTGLIHLHQNIVDVQYLYGVGSAVVGWALKWEFVVLVFLLLADARVCVALWMMLLISQAEAAMENLVMLNALSAAGQQGYVWYLVAFCAAWHIRGKLVPLITYGLTGLWPLALLDLLLPQRAYAWTGEDDATIGAGVLLLLGFFTLSPWYKHWIGRLIWWNQYAICRGEAALQVWVPPLLVRGSRDSVILLASLLYPSLIFDITKLLIAVLGPLYLIQAALTSTPYFVRAHVLIRICMLVRSAMGGKYVQMAVLTVGRWFNTYLYDHLSPIQDWAAEGLKGLAVATEPVIFSPMEIKVITWGADTAACGDILCGLPVSARLGRELLLGPADDYKKMGWRLLSPISAYAQQTRGLFGTIVTSLTGRDKNVVTGEVQVLSTATQTFLGTTVGGVMWTVYHGAGSRTLAGNKRPALQMYTNVDQDLVGWPAPAGTKSLDPCTCGSSDLYLVTREADVLPARRRGDSTASLLSTRPLSCLKGSSGGPVMCPSGHVVGIFRAAVCTRGVAKALQFIPVETLSTQVRSPSFSDNSTPPAVPESYQVGYLHAPTGSGKSTKVPAAYVAQGYSVLVLNPSVAATLGFGTYMSKAYGIDPNIRTGTRTITTGAKLTYSTYGKFLADGGCSGGAYDVIICDECHAQDATSILGIGTVLDQAETAGVRLTVLATATPPGSITVPHPNIEEVGLTSDGEIPFYGKALPLAMIKGGRHLVFCHSKEKCDELASKLRGMGVNAVAFYRGLDVSVIPVSGDVVVCATDALMTGYTGDFDTVIDCNVAVEQYVDFSLDPTFSIETRTVPQDAVSRSQRRGRTGRGRPGIYRFVTPGERPSGMFDSVVLCECYDAGCSWYDLQPAETTVRLRAYLSTPGLPVCQDHLDFWERVFTGLTHIDAHFLSQAKQQGLNFAYLVAYQATVCARAKASPPCWDEMWKCLIRLKPTLQGPTPLLYRLGAIQNDICMTHPITKYIMACMSADLEVTTSAWVLVGGVLAALAAYCLSVGCVVIVGHIELGGKPALVPDRQVLYQQYDEMEECSQSAPYIEQAQAIAQQFKDKVLGLLQRASQQEAEIRPIVQSQWQKAEAFWQQHMWNFVSGIQYLAGLSTLPGNPAVASLMAFTASVTSPLTTNQTMFFNILGGWVATHLAGPAASSAFVVSGLAGAAVGGIGIGRVLLDVLAGYGAGVSGALVAFKIMGGELPTTEDMVNLLPAILSPGALVVGVICAAVLRRHVGPGEGAVQWMNRLIAFASRGNHVSPTHYVPESDAAAKVTALLSSLTVTRLLRRLHQWINEDYPSPCNGDWLHDIWDWVCIVLSDFKTWLSAKIMPKVPGIPFLSCQKGYKGVWRGDGVMTTRCPCGEDFTGHVRNGSMRIAGSGLCANMWHGTFPINEYTTGPSTPVPAHNYSRALWRVTSDSYVEVRRVGDTHYVVGATNDGLKIPCQVPAPEFFTELDGVRLHRYAPPCKPLLRDEITFSVGLHSYANGSQLSCEPEPDVAVLTSMLRDPAHITAATAARRLARGSPPSEASSSASQLSAPSLKATCQTHRPHPDAELIDANLLWRQEMGSNITRVESETKVVILDSFEPLRAEEDDTELSIPAECFKKPPKYPPALPIWARPDYNPPLLPSWKDPTYEPPAVHGCALPPTRPAPVPPPRRKRTIKLDGSNVSAALLALAERSFPSTKPEGTGTSSSGVGTESTAESGDSPETGEESDVESYSSMPPLEGEPGDPDLDADSWSTVSDSEEQSVVCCSMSYSWTGAIITPCSAEEEKLPISPLSNSLLRHHNLVYSTSSRSAAARQKKVTFDRLQVLDDHYKNVLKEVKERASGVKGRLLSFEEACSLVPPHSGRSKYGYSAKDVRSLSSKAMNQIRSVWEDLLEDNSTPIPTTIMAKNEVFSVNPAKGGRKPARLIVYPDLGVRVCEKRALYDVIQKLSIATMGPAYGFQYSPKQRVEHLLKMWTSKKTPLGFSYDTRCFDSTVTEHDIRTEEGIYQCCDLEPEARKAISALTERLYIGGPMYNSKGLQCGYRRCRASGVLPTSFGNTITCYIKATAASRAAGLKNPSFLVCGDDLVVISESCGVEEDRTALRAFTEAMTRYSAPPGDAPQPTYDLELISSCSSNVSVACDGAGKRYYYLTRDPETPLARAAWETARHTPVNSWLGNIIMFAPTIWVRMVLITHFFSILQAQEQLERALDFEMYGATYSVTPLDLPAIIERLHGLSAFSLHGYSPTELNRVAGALRKLGIPPLRAWRHRARAVRAKLIAQGGKARICGLYLFNWAVRTKTKLTPLPTAGQLDLSSWFTVGVGGNDIYHSVSRARTRHLLLCLLLLTVGVGIFLLPAR

SEQ ID NO: 1732 - protein, 3010 aa, Artificial
  HCV
MSTNGKPQRKTKRNTNRRPQDVKFPGGGQIVGGVYLLPRRGPRLGVRATRKTWERSQPRGRRQPIPKARQPEGRAWAQPGYPWPLYGNEGLGWAGWLVSPRGSRPNWGPTDPRRRSRNLGKVIDTLTCGFADLMGYIPLVGAPLGGVARALAHGVRVLEDGVNYATGNLPGCSFSIFLLALLSCLTIPASAYEVHNVSGIYHVTNDCSNSSIVYEAADMIMHTPGCVPCVRENNSSRCWVALTPTLAARNNSVPTATIRRHVDLLVGAAAFCSAMYVGDLCGSVFLVSQLFTFSPRRYETVQDCNCSIYPGHVTGHRMAWDMMMNWSPTTALVVSQLLRIPQAVVDMVGGAHWGVLAGLAYYSMVGNWAKVLIVMLLFAGVDGSTIVSGGTVARTTHSLASLFTQGASQKIQLINTNGSWHINRTALNCNDSLQTGFLASLFYAHRFNASGCPERMASCRSIDKFDQGWGPITYTEADIQDQRPYCWHYAPRPCGIVPASQVCGPVYCFTPSPVVVGTTDRFGAPTYSWGENETDVLILNNTRPPQGNWFGCTWMNSTGFTKTCGGPPCNIGGGGNNTLVCPTDCFRKHPEATYTKCGSGPWLTPRCMVDYPYRLWHYPCTVNFTIFKVRMYVGGVEHRLNAACNWTRGERCDLEDRDRSELSPLLLSTTEWQILPCSFTGLPALSTGLIHLHQNVVDVQYLYGIGSAVVSFAIKWEYILLLFLLLADARVCACLWMMLLIAQAEAALENLVVFNAASVAGMHGTLSFLVFFCAAWYIKGRLVPGAAYALYGVWPLLLLLLALPPRAYAMDREMAASCGGAVFVGLVLLTLSPHYKMFLARLIWWLQYFITRAEAHLQVWIPPLNVRGGRDAIILLTCAAYPELIFDITKILLAILGPLMVLQAGLTRIPYFVRAQGLIRACMLVRKAAGGHYVQMALMKLAALTGTYVYDHLTPLQDWAHTGLRDLAVAVEPVVFSDMETKIITWGADTAACGDIILGLPVSARRGREILLGPADSLEGRGWRLLAPITAYAQQTRGLFGCIITSLTGRDKNQVEGEVQVVSTATQSFLATCINGVCWTVYHGAGSKTLAGPKGPITQMYTNVDQDLVGWHAPQGARSLTPCTCGSSDLYLVTRHADVIPVRRRGDSRGSLLSPRPISYLKGSSGGPLLCPSGHVVGIFRAAVCTRGVAKAVDFVPVESMETTMRSPVFTDNSSPPAVPQAFQVAHLHAPTGSGKSTKVPAAYAAQGYKVLVLNPSVAATLGFGAYMSKAHGVDPNIRTGVRTITTGAPITYSTYGKFLADGGCSGGAYDIIMCDECHSTDSTTILGIGTVLDQAETAGARLVVLATATPPGSVTVPHPNIEEIALSNTGEIPFYGKAIPIETIKGGRHLIFCHSKKKCDELAAKLSALGIHAVAYYRGLDVSVIPASGNVVVVATDALMTGFTGDFDSVIDCNTCVTQTVDFSLDPTFTIETTTMPQDAVSRSQRRGRTSRGRRGIYRFVTPGERPSGMFDSSVLCECYDAGCAWYELTPAETSVRLRAYLNTPGLPVCQDHLEFWESVFTGLTHIDAHFLSQTKQAGDNFPYLVAYQATVCARAQAPPPSWDQMWKCLTRLKPTLHGPTPLLYRLGAVQNEVTLTHPITKYIMACMSADLEVVTSTWVLVGGVLAALAAYCLTTGSVVIVGRIILSGKPAVVPDREVLYQEFDEMEECASHLPYIEQGMQLAEQFKQKALGLLQTATKQAEAAAPVVESKWRTLEAFWANDMWNFISGIQYLAGLSTLPGNPAIASLMAFTASITSPLTTQSTLLFNILGGWVAAQLAPPGAASAFVGAGIAGAAVGSIGLGKVLVDMVAGYGAGVAGALVAFKVMSGEMPSTEDLVNLLPAILSPGALVVGVVCAAILRRHVDPGEGAVQWMNRLIAFASRGNHVSPTHYVPESDAAARVTQILSGLTITQLLRRLHQWINEDCSTPCSGSWLRDVWDWICTVLADFKTWLQSKLLPRLPGVPFFSCQRGYKGVWRGDGIMQTTCPCGAQLTGHVKNGSMRIWGPKTCSNTWHGTFPINAYTTGPCTPSPAPNYSRALWRVAAEEYVEVRRVGDFHYVTGMTTDNVKCPCQVPAPEFFTEVDGVRLHRYAPACKPLLREEVSFQVGLNQYVVGSQLPCEPEPDVAVLTSMLTDPSHITAETAKRRLARGSPPSLASSSASQLSALSLKAACTTRHTPPDADLIEANLLWRQEMGGNITRVESENKVVILDSFDPLRAEEDEREVSVPAEILRKSRKFPPALPVWARPDYNPPLLEPWKDPDYVPPVVHGCPLPPVKAPPIPPPRRKRTVVLTESTVSSALAELATKTFGSSESSAAGSGTATAPPDQPSDDGDAGSDVESCSSMPPLEGEPGDPDLSDGSWSTVSEEDGEGVICCSMSYTWTGALITPCAAEESKLPINALSNSLLRHHNMVYATTSRSASQRQKKVTIDRLQVLDDHYRDVLKEMKAKASTVKAKLLSVEEACKLTPPHSARSKFGYGAKDVRNLSGKAINHIRSVWKDLLEDTETPIDTTIMAKNEVFCVQPEKGGRKPARLIVFPDLGVRVCEKMALYDVVSTLPQAVMGSSYGFQYSPGQRVEFLVNAWKSKKCPMGFSYDTRCFDSTVTESDIRVEESIYQCCDLAPEARQAIRSLTERLYIGGPLTNSKGQNCGYRRCRASGVLTTSCGNTLTCYLKASAACRAAKLQDCTMLVCGDDLVVICESAGTQEDAASLRVFTEAMTRYSAPPGDLPQPEYDQELITSCSSNVSVAHDASGKRVYYLTRDPTTPLARAAWATARHTPVNSWLGNIIMYAPTLWARMILMTHFFSILLAQEQLEKALDCQIYGACYSIEPLDLPQIIERLHGLSAFSLHSYSPGEINRVASCLRKLGVPPLRAWRHRARSVRAKLLSQGGRAATCGRYLFNWAVKTKLKLTPIPAASQLDLSKWFVAGYGGGDIYHSLSRARPRWFMLCLLLLSVGVGIYLLPNR

SEQ ID NO: 1733 - protein, 3010 aa, Artificial
  HCV
MSTNPKPQRKTKRNTNRRPQDVKFPGGGQIVGGVYLLPRRGPRLGVRATRKTSERSQPRGRRQPIPKARRPEGRTWAQPGYPWPLYGNEGFGWAGWLLSPRGSRPSWGPTDPRRRSRNLGKVIDTLTCGFADLMGYIPLVGAPLGGAARALAHGVRVLEDGVNYATGNLPGCSFSIFLLALLSCLTTPASAYEVRNVSGIYHVTNDCSNSSIVYEAADLIMHTPGCVPCVREGNSSRCWVALTPTLAARNATIPTATVRRHVDLLVGAAAFSSAMYVGDLCGSVFLVSQLFTFSPRRYETIQDCNCSIYPGHVTGHRMAWDMMMNWSPTTALVVSQLLRIPQAVMDMVVGAHWGVLAGLAYYAMVGNWAKVLIVMLLFAGVDGDTYASGGAQGRSTLGFTSLFTPGASQKIQLINTNGSWHINRTALNCNDSLNTGFLAALFYTHRFNASGCAERMASCRPIDTFDQGWGPITYTEPDSSDQRPYCWHYAPRKCGIVPASEVCGPVYCFTPSPVVVGTTDRFGVPTYSWGENETDVLLLNNTRPPQGNWFGCTWMNGTGFTKTCGGPPCNIGGVGNNTLTCPTDCFRKHPEATYTRCGSGPWLTPRCLVDYPYRLWHYPCTVNFAIFKVRMYVGGVEHRLDAACNWTRGERCNLEDRDRSELSPLLLSTTEWQILPCAFTTLPALSTGLIHLHQNIVDVQYLYGIGSAVASFAIKWEYVLLLFLLLADARVCACLWMMLLIAQAEAALENLVVLNAASVADAHGILSFLVFFCAAWYIKGRLVPGAAYAFYGVWPLLLLLLTLPPRAYAMDREMAASCGGAVFVGLVFLTLSPYYKVFLARLIWWLQYFLTIAEAHLQVWIPPLNIRGGRDAIILLTCAIHPESIFDITKLLLATLGPLLVLQAGITRVPYFVRAHGLIRACMLLRKVAGGHYVQMAFMKLGALTGTYVYNHLTPLQYWPRAGLRELAVAVEPVIFSDMETKIITWGADTAACGDIILGLPVSARRGKEILLGPADSLEGQGWRLLAPITAYSQQTRGLLGCIITSLTGRDKNQVEGEVQVVSTATQSFLATCINGVCWTVYHGAGSKTLAGPKGPITQMYTNVDQDLVGWHRPPGARSLTPCTCGSSDLYLVTRHADVIPVRRRGDSRGSLLSPRPVSYLKGSSGGPLLCPFGHVAGIFRAAVCTRGVAKAVDFIPVETMETTMRSPVFTDNSSPPAVPQTFQVAHLHAPTGSGKSTKVPAAYAAQGYKVLVLNPSVAATLGFGAYMSKAHGVDPNIRTGVRTITTGAPITYSTYGKFLADGGCSGGAYDIIICDECHSTDSTTILGIGTVLDQAETAGARLVVLATATPPGSVTVPHPNIEEVALSNTGEIPFYGKAIPIEAIRGGRHLIFCHSKKKCDELAAKLSSLGLNAVAYYRGLDVSVIPSSGDVVVVATDALMTGFTGDFDSVIDCNTCVTQTVDFSLDPTFTIETTTVPQDAVSRSQRRGRTGRGREGIYRFVTPGERPSGMFDSSVLCECYDAGCAWYELTPAETTVRLRAYLNTPGLPVCQDHLEFWEGVFTGLTHIDAHFLSQTKQAGDNFPYLVAYQATVCAKAQAPPPSWDQMWKCLTRLKPTLQGPTPLLYRLGAVQNEVTLTHPITKYIMTCMSADLEVVTSTWVLVGGVLAALAAYCLTTGSVVIVGRIVLSGSPAIVPDREVLYQDFDEMEECASHLPYIEQGMQLAEQFKQKALGLLQTATKQAEAAAPVVESKWRALETFWEKHMWNFISGIQYLAGLSTLPGNPAMASLMAFTASITSPLTTQHTLLFNILGGWVAAQLAPPSAASAFVGAGIAGAAVGSIGLGKVLVDILAGYGAGVAGALVAFKVMSGEMPSTEDLVNLLPAILSPGALVVGVVCAAILRRHVGPGEGAVQWMNRLIAFASRGNHVSPTHYVPESDAAARVTQILSSLTITQLLKRLHQWINEDCSTPCSGSWLRDVWDWICTVLTDFKTWLQSKLLPRLPGVPFLSCQRGYKGVWRGDGIMQTTCPCGAQITGHVKNGSMRIVGPKTCSNTWHGTFPINAYTTGPCTPSPAPNYSRALWRVAPEEYVEVTRVGDFHYVTGMTTDNVKCPCQVPAPEFFTEVDGVRLHRYAPACKPLLREEVVFQVGLNQYLVGSQLPCEPEPDVTVLTSMLTDPSHITAETAKRRLARGSPPSLASSSASQLSAPSLKATCTTHHDSPDADLIEANLLWRQEMGGNITRVESENKVVILDSFDPLRAEEDEREVSVAAEILRKSRKFPSALPIWARPDYNPPLLESWKDPDYVPPVVHGCPLPPTTAPPVPPPRRKRTVVLTESSVSSALAELATKTFGSSESSAVDSGTATAPPDEASGGGDKGSDVESYSSMPPLEGEPGDPDLSDGSWSTVSEEASEDVVCCSMSYTWTGALITPCAAEESKLPINPLSNSLLRHHNMVYATTSRSASLRQKKVAFDRMQVLDDHYRDVLKEMKAKASTVKAKLLSIEEACKLTPPHSAKSKFGYGAKDVRNLSSKAVNHIRSVWKDLLEDNETPINTTIMAKNEVFCVQPEKGGRKPARLIVFPDLGVRVCEKMALYDVVSTLPQPVMGSSYGFQYSPGQRVEFLLNAWKSKENPMGFSYDTRCFDSTVTQNDIRVEESIYQCCDLAPEARRAIKSLTERLYIGGPLTNSKGQNCGYRRCRASGVLTTSCGNTLTCYLKASAACRAAKLQDCTMLVNGDDLVVICESAGTQEDAASLRVFTEAMTRYSAPPGDLPQPEYDLELITSCSSNVSVAHDASGKRVYYLTRDPTIPLARAAWETARHTPVNSWLGNIIMYAPTLWARMILMTHFFSILLAQEQLEKALDCQIYGAYYSIEPLDLPQIIERLHGLSAFSLHSYSPGEINRVASCLRKLGVPPLRVWRHRARSVRAKLLSQGGRAATCGKYLFNWAVKTKLKLTPIPAASRLDLSGWFVAGYSGGDIYHSLSRARPRWFMLCLLLLSVGVGIYLLPNR

SEQ ID NO: 1734 - protein, 3010 aa, Artificial
  HCV
MSTNPKPQRKTKRNTNRRPQDVKFPGGGQIVGGVYLLPRRGPRLGVRAPRKTSERSQPRGRRQPIPKARRPEGRTWAQPGYPWPLYGNEGLGWAGWLLSPRGSRPSWGPTDPRRRSRNLGKVIDTLTCGFADLMGYIPLVGAPLGGAARALAHGVRVLEDGVNYATGNLPGCSFSIFLLALLSCLTTPASAYEVHNVSGIYHVTNDCSNASIVYEAADLIMHTPGCVPCVREGNSSRCWVALTPTLAARNVTIPTTTIRRHVDLLVGAAAFCSAMYVGDLCGSVFLVSQLFTFSPRRHVTLQDCNCSIYPGHVSGHRMAWDMMMNWSPTTALVVSQLLRIPQAVVDMVAGAHWGVLAGLAYYSMAGNWAKVLIVMLLFAGVDGDTHVTGGAQAKTTNRLVSMFASGPSQKIQLINTNGSWHINRTALNCNDSLQTGFLAALFYTHSFNSSGCPERMAQCRTIDKFDQGWGPITYAESSRSDQRPYCWHYPPPQCTIVPASEVCGPVYCFTPSPVVVGTTDRFGVPTYRWGENETDVLLLNNTRPPQGNWFGCTWMNSTGFTKTCGGPPCNIGGVGNNTLTCPTDCFRKHPEATYTKCGSGPWLTPRCMVDYPYRLWHYPCTVNFTIFKVRMYVGGVEHRLNAACNWTRGERCDLEDRDRPELSPLLLSTTEWQVLPCSFTTLPALSTGLIHLHQNIVDVQYLYGIGSAVVSFAIKWEYVLLLFLLLADARVCACLWMMLLIAQAEAALENLVVLNSASVAGAHGILSFLVFFCAAWYIKGRLVPGATYALYGVWPLLLLLLALPPRAYAMDREMAASCGGAVFVGLVLLTLSPYYKVFLARLIWWLQYFTTRAEADLHVWIPPLNARGGRDAIILLMCAVHPELIFDITKLLIAILGPLMVLQAGITRVPYFVRAQGLIHACMLVRKVAGGHYVQMAFMKLGALTGTYIYNHLTPLRDWPRAGLRDLAVAVEPVVFSDMETKIITWGADTAACGDIILGLPVSARRGKEILLGPADSLEGRGLRLLAPITAYSQQTRGLLGCIITSLTGRDKNQVEGEVQVVSTATQSFLATCVNGVCWTVYHGAGSKTLAAPKGPITQMYTNVDQDLVGWPKPPGARSLTPCTCGSSDLYLVTRHADVIPVRRRGDSRGSLLSPRPVSYLKGSSGGPLLCPFGHAVGIFRAAVCTRGVAKAVDFVPVESMETTMRSPVFTDNSSPPAVPQSFQVAHLHAPTGSGKSTKVPAAYAAQGYKVLVLNPSVAATLGFGAYMSKAHGIDPNIRTGVRTITTGAPVTYSTYGKFLADGGCSGGAYDIIICDECHSTDSTTILGIGTVLDQAETAGARLVVLATATPPGSVTVPHPNIEEVALSNTGEIPFYGKAIPIEAIRGGRHLIFCHSKKKCDELAAKLSGLGINAVAYYRGLDVSVIPTIGDVVVVATDALMTGYTGDFDSVIDCNTCVTQTVDFSLDPTFTIETTTVPQDAVSRSQRRGRTGRGRRGIYRFVTPGERPSGMFDSSVLCECYDAGCAWYELTPAETSVRLRAYLNTPGLPVCQDHLEFWESVFTGLTHIDAHFLSQTKQAGDNFPYLVAYQATVCARAQAPPPSWDQMWKCLIRLKPTLHGPTPLLYRLGAVQNEVTLTHPITKYIMACMSADLEVVTSTWVLVGGVLAALAAYCLTTGSVVIVGRIILSGRPAIVPDRELLYQEFDEMEECASHLPYIEQGMQLAEQFKQKALGLLQTATKQAEAAAPVVESKWRALETFWAKHMWNFISGIQYLAGLSTLPGNPAIASLMAFTASITSPLTTQSTLLFNILGGWVAAQLAPPSAASAFVGAGIAGAAVGSIGLGKVLVDILAGYGAGVAGALVAFKVMSGEMPSTEDLVNLLPAILSPGALVVGVVCAAILRRHVGPGEGAVQWMNRLIAFASRGNHVSPTHYVPESDAAARVTQILSSLTITQLLKRLHQWINEDCSTPCSGSWLRDVWDWICTVLTDFKTWLQSKLLPQLPGVPFFSCQRGYKGVWRGDGIMQTTCPCGAQITGHVKNGSMRIVGPKTCSNTWHGTFPINAYTTGPCTPSPAPNYSRALWRVAAEEYVEVTRVGDFHYVTGMTTDNVKCPCQVPAPEFFSEVDGVRLHRYAPACRPLLREEVTFQVGLNQYLVGSQLPCEPEPDVAVLTSMLTDPSHITAETAKRRLARGSPPSLASSSASQLSAPSLKATCTTHHVSPDADLIEANLLWRQEMGGNITRVESENKVVVLDSFDPLRAEEDEREVSVPAEILRKSKKFPAAMPIWARPDYNPPLLESWKDPDYVPPVVHGCPLPPIKAPPIPPPRRKRTVVLTESSVSSALAELATKTFGSSESSAVDSGTATALPDQASDDGDKGSDVESYSSMPPLEGEPGDPDLSDGSWSTVSEEASEDVVCCSMSYTWTGALITPCAAEESKLPINALSNSLLRHHNMVYATTSRSAGLRQKKVTFDRLQVLDDHYRDVLKEMKAKASTVKAKLLSVEEACKLTPPHSAKSKFGYGAKDVRNLSSKAVNHIHSVWKDLLEDTVTPIDTTIMAKNEVFCVQPEKGGRKPARLIVFPDLGVRVCEKMALYDVVSTLPQVVMGSSYGFQYSPGQRVEFLVNTWKSKKNPMGFSYDTRCFDSTVTENDIRVEESIYQCCDLAPEARQAIKSLTERLYIGGPLTNSKGQNCGYRRCRASGVLTTSCGNTLTCYLKASAACRAAKLQDCTMLVNGDDLVVICESAGTQEDAASLRVFTEAMTRYSAPPGDPPQPEYDLELITSCSSNVSVAHDASGKRVYYLTRDPTTPLARAAWETARHTPVNSWLGNIIMYAPTLWARMILMTHFFSILLAQEQLEKALDCQIYGACYSIEPLDLPQIIERLHGLSAFSLHSYSPGEINRVASCLRKLGVPPLRVWRHRARSVRARLLSQGGRAATCGKYLFNWAVKTKLKLTPIPAASRLDLSGWFVAGYSGGDIYHSLSRARPRWFMLCLLLLSVGVGIYLLPNR

SEQ ID NO: 1735 - protein, 3010 aa, Artificial
  HCV
MSTNPKPQRKTKRNTNRRPQDVKFPGGGQIVGGVYLLPRRGPRLGVRATRKTSERSQPRGRRQPIPKARRPEGRTWAQPGYPWPLYGNEGMGWAGWLLSPRGSRPSWGPTDPRRRSRNLGKVIDTLTCGFADLMGYIPLVGAPLGGAARALAHGVRVLEDGVNYATGNLPGCSFSIFLLALLSCLTVPVSAYEVRNVSGGYHVTNDCSNSSIVYEAADVIMHTPGCVPCVRENNSSRCWVALTPTLAARNTTVPTTTIRRHVDLLVGTAAFCSAMYVGDLCGSVFLVSQLFTFSPRRHETVQDCNCSIYPGHLSGHRMAWDMMMNWSPTAALVVSQLLRIPQAVVDMVAGAHWGVLAGLAYYSMVGNWAKVLIVMLLFAGVDGQTYTTGGAVARTTTGFASLFSAGSQENIQLINTNGSWHINRTALNCNDSLNTGFLAALFYTHKFNSSRAESVLASCRFIDEFDQGWGPITYTERNSSDQRPYCWHYPPRQCGIIPASEVCGPVYCFTPSPVVVGTTDRFGVPTYSWGENETDVLVLNNTRPPQGNWFGCTWMNGTGFTKTCGGPPCHIGGRGNNTLTCPTDCFRKHPEATYTKCGSGPWLTPRCMVDYPYRLWHYPCTVNFTTFKVRMYVGGVEHRLIAACNWTRGDRCNLEDRDRSELSPLLLSTTEWQILPCSFTTLPALSTGLIHLHQNIVDVQYLYGIGSAVVSIAIRWEYVLLLFLLLADARVCACLWMMLLIAQAEAALENLVVLNAASVAGAHGILSFLVFFCAAWYIKGRLVPGAAYALYGVWPLLLLLLALPPRAYAMDREMAASCGGAVFMGLAFLTLSPHYKVFLARLIWWLQYLLTRAEAHLHMWIPPLNVRGGRDAIILLACAAHPELIFDITKLLLAILGPLYMLQAGITAVPYFVRAQGLIRACMLVRKVAGGHYVQMAFMKLAALTGTYVYDHLTPLRDWAHAGLRDLAVAVEPVVFSDMETKIITWGADTAACGDIILGLPVSARRGREILLGPADSLEGQGWRLLAPITAYSQQTRGLLGCIITSLTGRDKNQVEGEVQVVSTATQSFLATCINGVCWTVYHGAGSKTLAGPKGPITQMYTNVDQDLVGWQAPPGARSMTPCTCGSSDLYLVTRHADVIPVRRRGDGRGSLLSPRPVSYLKGSSGGPLLCPSGHAVGIFRAAVCTRGVAKAVDFIPVESMETTMRSPVFTDNSSPPAVPQTFQVAHLHAPTGSGKSTKVPAAYAAQGYKVLVLNPSVAATLGFGAYMSKAYGTDPNVRTGVRTITTGSPITYSTYGKFLADGGCSGGAYDIIICDECHSTDSTTILGIGTVLDQAETAGARLVVLATATPPGSVTVPHPNIEEVGLSNTGEIPFYGKAIPIEVIKGGRHLIFCHSKKKCDELAAKLSALGINAVAYYRGLDVSVIPASGDVVVVATDALMTGFTGDFDSVIDCNTCVTQTVDFSLDPTFTIETTTVPQDAVSRSQRRGRTGRGRAGIYRFVTPGERPSGMFDSSVLCECYDSGCAWYELTPAETSVRLRAYLNTPGLPVCQDHLEFWESVFTGLTHIDAHFLSQTKQAGDNFPYLVAYQATVCARSQAPPPSWDQMWKCLIRLKPTLHGPTPLLYRLGAVQNEVTLTHPITKFIMACMSADLEVVTSTWVLVGGVLAALAAYCLTTGSVVIVGRIILSGRPAVIPDREVLYREFDEMEECASHLPYIEQGMLLAEQFKQKALGLLQMATKQAEAAAPVVETKWQALEVFWAKHMWNFISGIQYLAGLSTLPGNPAIASLMAFTSSITSPLTTQSTLLFNILGGWVAAQLAPPSAASAFVGAGIAGAAVGSIGLGKVLVDILAGYGAGVAGALVAFKVMSGEVPSTEDLVNLLPAILSPGALVVGVVCAAILRRHVGPGEGAVQWMNRLIAFASRGNHVSPTHYVPESDAAQRVTQILSSLTITQLLKRLHQWINEDCSTPCSGSWLRDVWDWICTVLTDFKTWLQSKLLPRLPGVPFFSCQRGYKGVWRGEGIMQTTCPCGAQIAGHVKNGSMRIVGPRTCSNTWHGTFPINAYTTGPCSPSPAPNYSRALWRVAAEEYVEVTRVGDFHYVTGVTTDNVKCPCQVPAPEFFTELDGVRLHRYAPACKPLLRDEVSFQVGLNQYLVGSQLPCEPEPDVAVLTSMLTDPSHITAETAKRRLARGSPPSLASSSASQLSAPSLKATCTIHHDSPDADLIEANLLWRQEMGGNITRVESENKVVILDSFEPIRAEEDEREVSVPAEILRRSRKFPAAMPIWARPDYNPPLLESWKDPDYVPPVVHGCPLPPTKAAPIPPPRRKRTIVLTESTVSSALAELATKTFGGSGSSAADSGTATAPPDQTSDDGDKESDVESYSSMPPLEGEPGDPDLSDGSWSTVSEEASEDVVCCSMSYTWTGALITPCAAEESKLPINPLSNSLLRHHNMVYATTSRSASLRQKKVTFDRLQVLDDHYRDVLKEMKAKASTVKAKLLSVEEACKLTPPHSAKSKFGYGAKDVRSLSSRAVNHITSVWKDLLEDTKTPIDTTIMAKNEVFCVQPEKGGRKPARLIVFPDLGVRVCEKMALYDVVSTLPQAVMGSSYGFQYSPGQRVEFLVKTWKSKKCPMGFSYDTRCFDSTVTENDIRIEESIYQCCDLAPEARQVIRSLTERLYIGGPLTNSKGQNCGYRRCRASGVLTTSCGNTLTCYLKASAACRAAKLQDCTMLVNGDDLVVICESAGTQEDAASLRVFTEAMTRYSAPPGDPPQPEYDLELITSCSSNVSVAHDASGKRVYYLTRDPTTPLARAAWETARHTPVNSWLGNIIMYAPTLWARMILMTHFFSILLAQEQLGKALDCQIYGACYSIEPLDLPQIIERLHGLSAFSLHSYSPGEINRVASCLRKLGVPPLRVWRHRARSVRAKLLSQGGRAATCGKYLFNWAVRTKLKLTPIPAASQLDLSSWFVAGYSGGDIYHSLSRARPRWFMLCLLLLSVGVGVYLLPNR

SEQ ID NO: 1736 - protein, 3010 aa, Artificial
  HCV
MSTNPKPQRKTKRNTNRRPQDVKFPGGGQIVGGVYLLPRRGPRLGVRATRKTSERSQPRGRRQPIPKARRPEGRTWAQPGYPWPLYGNEGMGWAGWLLSPRGSRPSWGPTDPRRRSRNLGKVIDTLTCGFADLMGYIPLVGAPLGGAARALAHGVRVLEDGVNYATGNLPGCSFSIFLLALLSCLTIPASAYEVRNVSGIYHVTNDCSNSSIVYEAADMIMHTPGCVPCVRESNFSRCWVALTPTLAARNSSIPTTTIRRHVDLLVGAAALCSAMYVGDLCGSVFLVSQLFTFSPRRYETVQDCNCSIYPGHVSGHRMAWDMMMNWSPTTALVVSQLLRIPQAVVDMVAGAHWGVLAGLAYYSMVGNWAKVLIVMLLFAGVDGHTHVTGGRVASSTQSLVSWLSQGPSQKIQLVNTNGSWHINRTALNCNDSLQTGFIAALFYAHRFNASGCPERMASCRPIDEFAQGWGPITHDMPESSDQRPYCWHYAPRPCGIVPASQVCGPVYCFTPSPVVVGTTDRFGAPTYSWGENETDVLLLSNTRPPQGNWFGCTWMNSTGFTKTCGGPPCNIGGVGNNTLVCPTDCFRKHPEATYTKCGSGPWLTPRCMVDYPYRLWHYPCTVNFTVFKVRMYVGGVEHRLNAACNWTRGERCDLEDRDRSELSPLLLSTTEWQILPCSFTTLPALSTGLIHLHRNIVDVQYLYGIGSAVVSFAIKWEYILLLFLLLADARVCACLWMMLLIAQAEATLENLVVLNAASVAGAHGLLSFLVFFCAAWYIKGRLVPGAAYALYGVWPLLLLLLALPPRAYAMDREMAASCGGAVFVGLVLLTLSPYYKVFLARLIWWLQYFITRAEAHLQVWVPPLNVRGGRDAIILLTCAVHPELIFDITKLLLAILGPLMVLQAGITRVPYFVRAQGLIRACMLVRKVAGGHYVQMAFMKLAALTGTYVYDHLTPLRDWAHAGLRDLAVAVEPVVFSDMETKLITWGADTAACGDIISGLPVSARRGKEILLGPADSFGEQGWRLLAPITAYSQQTRGLLGCIITSLTGRDKNQVDGEVQVLSTATQSFLATCVNGVCWTVYHGAGSKTLAGPKGPITQMYTNVDQDLVGWPAPPGARSMTPCTCGSSDLYLVTRHADVVPVRRRGDSRGSLLSPRPISYLKGSSGGPLLCPSGHVVGIFRAAVCTRGVAKAVDFIPVESMETTMRSPVFTDNSSPPAVPQTFQVAHLHAPTGSGKSTKVPAAYAAQGYKVLVLNPSVAATLGFGAYMSKAHGIEPNIRTGVRTITTGGPITYSTYCKFLADGGCSGGAYDIIICDECHSTDSTTILGIGTVLDQAETAGARLVVLATATPPGSITVPHPNIEEVALSNTGEIPFYGKAIPIEAIKGGRHLIFCHSKKKCDELAAKLTGLGLNAVAYYRGLDVSVIPTSGDVVVVATDALMTGFTGDFDSVIDCNTCVTQTVDFSLDPTFTIETTTLPQDAVSRAQRRGRTGRGRSGIYRFVTPGERPSGMFDSSVLCECYDAGCAWYELTPAETSVRLRAYLNTPGLPVCQDHLEFWESVFTGLTHIDAHFLSQTKQAGDNLPYLVAYQATVCARAQAPPPSWDQMWKCLIRLKPTLHGPTPLLYRLGAVQNEVTLTHPITKYIMACMSADLEVVTSTWVLVGGVLAALAAYCLTTGSVVIVGRIILSGRPAVIPDREVLYQEFDEMEECASHLPYIEQGMQLAEQFKQKALGLLQTATKQAEAAAPVVESKWRALEVFWAKHMWNFISGIQYLAGLSTLPGNPAIASLMAFTASITSPLTTQNTLLFNILGGWVAAQLAPPSAASAFVGAGIAGAAVGSIGLGKVLVDILAGYGAGVAGALVAFKVMSGEMPSTEDLVNLLPAILSPGALVVGVVCAAILRRHVGPGEGAVQWMNRLIAFASRGNHVSPTHYVPESDAAARVTQILSSLTITQLLKRLHQWINEDCSTPCSGSWLKDVWDWICTVLSDFKTWLQSKLLPRLPGLPFLSCQRGYKGVWRGDGIMQTTCPCGAQITGHVKNGSMRIVGPKTCSNTWHGTFPINAYTTGPCTPSPAPNYSRALWRVAAEEYVEVTRVGDFHYVTGMTTDNVKCPCQVPAPEFFTEVDGVRLHRYAPVCKPLLREEVVFQVGLNQYLVGSQLPCEPEPDVAVLTSMLTDPSHITAETAKRRLARGSPPSLASSSASQLSAPSLKATCTTHHDSPDADLIEANLLWRQEMGGNITRVESENKVVILDSFDPIRAVEDEREISVPAEILRKPRKFPPALPIWARPDYNPPLLESWKDPDYVPPVVHGCPLPSTKAPPIPPPRRKRTVVLTESTVSSALAELATKTFGSSGSSAVDSGTATGPPDQASDDGDKGSDVESYSSMPPLEGEPGDPDLSDGSWSTVSGEAGEDVVCCSMSYTWTGALITPCAAEESKLPINPLSNSLLRHHSMVYSTTSRSASLRQKKVTFDRLQVLDDHYRDVLKEMKAKASTVKARLLSIEEACKLTPPHSAKSKFGYGAKDVRSLSSRAVNHIRSVWEDLLEDTETPIDTTIMAKNEVFCVQPEKGGRKPARLIVFPDLGVRVCEKMALYDVVSTLPQAVMGPSYGFQYSPGQRVEFLVNTWKSKKCPMGFSYDTRCFDSTVTENDIRTEESIYQCCDLAPEARQAIRSLTERLYVGGPLTNSKGQNCGYRRCRASGVLTTSCGNTLTCYLKATAACRAAKLQDCTMLVNGDDLVVICESAGTQEDAAALRAFTEAMTRYSAPPGDPPQPEYDLELITSCSSNVSVAHDASGKRVYYLTRDPTTPLARAAWETVRHTPVNSWLGNIIMYAPTLWARMILMTHFFSILLAQEQLEKALDCQIYGACYSIEPLDLPQIIERLHGLSAFSLHSYSPGEINRVASCLRKLGVPPLRVWRHRARSVRAKLLSQGGRAATCGKYLFNWAVKTKLKLTPIPAASQLDLSGWFVAGYNGGDIYHSLSRARPRWFMLCLLLLSVGVGIYLLPNR

SEQ ID NO: 1737 - protein, 3022 aa, Artificial
  HCV
MSTNPKPQRQTKRNTNRRPQDVKFPGGGQIVGGVYLLPRRGPRLGVRATRKTSERSQPRGRRQPIPKARRQTGRAWGQPGYAWPLYGNEGCGWAGWLLSPRGSRPTWGPNDPRRRSRNLGKVIDTLTCGLADLMGYIPVIGGPLGGVAAALAHGVRAVEDGVNYATGNLPGCSFSIFLLALLSCLTVPASAVNYANKSGIYHLTNDCPNSSMVYEAEAIILHLPGCVPCIRTGNQSRCWTPATPTLAIPNSTVPASGFRQHIDLMVGAAALCSAMYLGDLCGGVFLVGQLFTFRPRIHQTVQDCNCSIYTGHVTGHRMAWDMMMNWSPTATFVVSSALRAPQVLFDIFAGGHWGIIGALLYYSTAANWAKVIIVLLLFAGVDASTYVASSVSQATSGLVSLFSAGARQNLQLINTNGSWHINRTALNCNDSLQTGFIASLFYRNKFNATGCPERLSACKTLDSFDQGWGPITYANISGPAVEKPYCWHYPPRPCEVVSALNVCGPVYCFTPSPVVLGTTDRRGNPTYTWGANETDVFMMSSLRPPAGGWYGCTWMNTSGFVKTCGAPPCNIRPNPEENRTETLRCPTDCFRKHPGATYAKCGSGPWLTPRCLVDYPYRLWHYPCTVNYTLHKVRMYIAGSEHRFTAACNWTRGERCDLADRDRIEMSPLLFSTTELAILPCSFTTMPALSTGLIHLHQNVVDVQYLYGLSTSIVNWAIKWEYVVLLFLVLADSRICLALWLMLLIGQAEAALENLIVLNAASAAATRGWECFLLFMCWAWYVRGRVVPAVTYGLLNLWPLLLLVLLLPHRAYAYDGVQAGSIGAAVIAALTIFSLTPAYKTLLAHFLWWTQYFIAHIEAKLHVWVPFLRVRGGRDAIILLTCVFHPSLGFEVTKILLALIGPLYLLHASLLRVPYYVRAHALIRICALVQNVAGGKYVQAAILRAGSWTGTYIYDHLVPLRTWASDGLRDLAVAVEPVVFSPMEKKVITWGADTAACGDILAGLPVSARRGNLILLGPADDVKDKGWSLLAPITAYAQQTRGLLGTIVTSLTGRDKNEAAGEIQILSTATQTFLATCVNGVCWTVYHGAGSKTLAGPRGPVCQMYTNVDQDMVGWPAPAGTRSYTPCTCGASDLYLITRQADVIPARRRGDNRAGLISPRPISTLKGSSGGPLLCPSGHVVGLFRAAVCTRGVAKALDFVPCEAMDATTRSPTFTDNSTPPAVPQAYQVGYLHAPTGSGKSTKVPVAYASQGYKVLVLNPSVAATLSFGSYLSRAHGIDPNIRTGVRTITTGAPITYSTYGKFLADGGCSGGAYDVIICDECHSTDPTTVLGIGTVLDQAETAGCRLTVLATATPPGSVTVPHPNIQETALPLTGEVPFYGKAIPLEYIKGGRHLIFCHSKKKCDELAAQLRTLGLNAVAFYRGVDVSVIPTSGDVVVCATDALMTGYTGDFDSVIDCNVAVTQIVDFSLDPTFSIETTTVPQDAVARSQRRGRTGRGKPGVYRYVSQGERPSGMFDTVVLCEAYDTGAAWYELTPAETTVRLRAYLNTPGLPVCQDHLEFWEAVFTGLTHIDAHFLSQTKQGGENFAYLVAYQATVCARAKAPPPSWDTMWKCLLRLKPTLTGPTPLLYRLGAVQNEVTPTHPVTKYIMACMSADLEVITSTWVVAGGILAAIAAYCLTVGSVVICGRITTSSRPAVIPDREVMYQQYDEMEECSRHLPYLVEGQQLAEQFKQNVLGLIQVTTKQAEELKPAVHSAWPKLEQFWYKHMWNFISGIQYLAGLSTLPGNPAVAALMSFSASLTSPLTTAQTLLLNVLGGWVASQLATPVPATAFVVSGLAGAAIGSIGLGKVIVDILAGYGAGVSGALVAFKIMSGETPSVEDMVNLLPALLSPGALVVGVVRAAILRRHVGPSEGAAQWMNRLIAFASRGNHVSPTHYVPETDASRAVTNILSSLTITSLLRKLHHWITEDYATPCGSTWLRDIWDWVCTVLSDFRVWLKSKLMPSLPGVPFFSCQRGYRGTWRGDGICNTTCPCGASIAGHVKNGTMRIVGPRTCSNVWNGTFPINATTTGPSIPIPAPNYKKALWRVSATEYVEVVRVGDSHYITGVTAENTKCPCQVPAPEFFTEVDGVRLHRYAPECKPILRDEVTFTVGLSTYVVGSQLPCEPEPDVLVVTSMLRDPDHITAEEASRRLKRGSPPSLASSSASQLSAPSLKATCTTHADHPDAELVEANLLWRQEMGGNITRVESENKIVILDSFEPLKAEFDDREISVAAECHRPPRFKYPPALPVWARPDYNPPLLETWKAPDYDPPVVSGCALPPQGLPPVPPPRRKKLVQLDDSVVGHVLAQLAEKSFPATPDQPQTNSDSGHGTNGAASLPSAEDDDASDADSYSSMPPLEGEPGDPDLSDGGGSGSWSTVSSEETSVVCCSMSYSWTGALITPCAAEEEKLPISPLSNTLIRHHNMVYSTTSRSAALRQKKVTFDRQQVVDQHYYDTLKEMKARASTVSAKLLSVEEACDLTPAHSARSKFGYGAKDVRGRTSKALNHINSVWEDLLEDNVTPIPTTIMAKNEVFCVDVSKGGRKPARLIVYPDLSVRVCEKRALYDVTRKLPVAVMGAAYGFQYSPSQRVEYLLKIWRSKKTPMGFSYDTRCFDSTVTERDIRTEESIYQCCELDPVARKAISSLTERLYVGGPMYNSQGQSCGYRRCRASGVLPTSMGNTLTCYLKAMAACKAAGLKNFDMLVCGDDLVVISESLGVSEDASALRAFTDAMTRYSAPPGDEPHPEYDLEHITSCSSNVSVAHDHTGQRYYYLTRDPTNVLARAAWETARHTPVNSWLGNIIMYAPTIWVRMVLMTHFFGILQPQEQLHKALDFDMYGVTYNITPLDLPQIIQRLHGMAAFSLHGYSPGELNRVGACLRKLGAPPLRAWRHRARAVRAKLIAQGGKAAICGMYLFNWAVKTKLKLTPLRDAHRLDLSGWFVAGYSGGDIFHSVSHARPRVLLLCLLLLTVGVGIFFLPPR

SEQ ID NO: 1738 - protein, 3019 aa, Artificial
  HCV
MSTLPKPQRITKRNINRRPQDVKFPGGGQIVGGVYVLPRRGPKLGVRAVRKTSERSQPRSRRQPIPRARRTEGRSWAQPGYPWPLYGNEGCGWAGWLLSPRGSRPSWGPNDPRRRSRNLGKVIDTLTCGFADLMGYIPLVGAPVGGVARALAHGVRALEDGINFATGNLPGCSFSIFLLALLSCLLTPTAGLEYRNASGLYTVTNDCSNGSIVYEAGDVILHLPGCIPCVRLNNASKCWTPVSPTVAVSRPGAATASLRTHVDMMVGAATLCSALYVGDLCGALFLVGQGFSWRHRQHWTVQDCNCSIYPGHLTGHRMAWDMMMNWSPAMTLIVSQVLRLPQTMFDLVIGAHWGVMAGVAYYSMQGNWAKVFLVLCLFSGVDASTTITGGVAASGAFTITSLFSTGAKQPLHLVNTNGSWHINRTALNCNDSLNTGFIAGLLYYHKFNSSGCVERMSACSPLDRFAQGWGPLGPANISGPSSEKPYCWHYAPRPCDTVPAQSVCGPVYCFTPSPVVVGATDKRGAPTYTWGENESDVFLLESARPPTEPWFGCTWMNGSGYVKTCGAPPCHIYGGREGKSNNSLVCPTDCFRKHPDATYNRCGAGPWLTPRCLVDYPYRLWHYPCTVNYTIFKVRMFVGGLEHRFNAACNWTRGERCNLEDRDRSEMYPLLHSTTEQAILPCSFVPIPALSTGLIHLHQNIVDVQYLYGISSGLVGWAIKWEFVILIFLLLADARVCVVLWMMMLISQAEAALENLIVLNAISAAGTHGIWWSLVAFCVAWHVRGRIFPIAVYSIVGLWPLLLLVLMLPYRAYAWTGTDTSTLGAGVLSLFALFTLSPWYKHWIARLIWWNQYTIARCEAALQIWVPPLLARGARDGIILLAGLFYPALVFDITKLLLAILGPLYILQASLVRVPYFVRAHAVVRLCILVRNITGGKYVQMVLLALARGFNTYLYDHLSPMTDWAAEGLKDLAVAVEPVIFSPMEVKVITWGADTTACGDILCGLPVSARLGKEVLLGPADDYRSMGWRLLAPITAHAQQTRGLFGTIVTSLTGRDKNIVTGEIQVLSTSTQTFLGTSVGGVMWTVYHGAGSRTLAGNKRPALQMYTNVDQDLVGWPSPPGAKSLVPCTCGSADLYLITRDADVLPARRRGDSTASLLSPRPLACLKGSSGGPIMCPSGHVAGIFRAAVCTRGVAKALQFIPVESLSAQTRSPSFSDNSTPPAVPQTFQVGYLHAPTGSGESTKVPASYVAQGYTVLVLNPSVAATLGFGRFMSHAYGIDPNVRTGTRTITTGAKLTYSTYGKFLADGGCSGGAYDVIICDECHAQDATSILGIGTVLDQAETAGARLVVLATATPPGSITVPHSNIEEVALTGEGEIPFYGRAIPLGVIKGGRHLIFCHSKKKCDELAKQLTSLGVNAVAFYRGLDVSVIPTQGDVVVCATDALITGYTGDFDSVIDCNVAVEQYVDFSLDPTFSIETHTVPQDAVSRSQRRGRTGRGKSGTYRYVSPGERPSGMFDSVVLCECYDAGCAWYELTPSETTVRLRAYLSTPGLPVCQDHLEFWEGVFTGLTHIDAHFLSQTKQQGLNFPYLTAYQATVCARAAALPPSWDETWKCLIRLKPTLHGPTPLLYRLGAVQNEICTTHPVTKYIATCMAADLEVATSAWVLLGGVMAALTAYCLSVGSVVIVGHLVLGGKPALVPDKEVLYQQYDEMEECSRAAPYIEQAQGIAQQFKEKVIGLLQQADQKAADIKPIATPYWQKLETFWSKHMWNFVSGIQYLAGLSTLPGNPAIASLMAFTASVTSPLTTNQTLLFNIMGGWVASNLAPPPASTAFVVSGLAGAAVGSIGLGKVLLDILAGYGAGVAGALVAFKIMGGEMPSTEDMVNLLPAILSPGALVVGVICAAILRRHVGPGEGAVQWMNRLIAFASRGNHVAPTHYVPESDAAAKVTALLSSLTVTQLLRRLHQWINEDYPTPCDGNWLYDIWNWVCTVLADFKLWLGAKILPKMPGIPFLSCQKGYRGTWRGDGVVSTRCPCGALLSGHVKNGTMRLVGPRWCANTWHGTFPINGYTTGPSTPAPSYAYSRALWRVASDSYVEVRKVGDFHYVTGTTDDGLKCPCQVPLPEFFTELDGVRLHRYAPVCRPLLRDDVTFTVGLNSYVIGSQLPCEPEPDVAVVTSMLQDPSHITVETAKRRLDRGSPPSLASSSASQLSAPSRKATCTTHGRHPDAELITANLLWRQEMGSNITRVESESKVVILDSFEPLRACDDEDELSVAAECFKKPPKYPPALPIWARPDYNPPLVEPWKDPDYVPPTVHGCALPPQKLPPVPPPRRKRTIVLSESTVSKALASLAEKSFPQPTCSAEDESTSGVGTQSGSLTGPVQLDDDDSDNESHSSMPPLEGEPGDPDLSSGSWSTVSGEEQSVVCCSMSYSWTGALITPCAAEEEKLPISPLSNSLLRHHNLVYSTSSRSAAQRQKKVTFDRLQVLDDHYNTTLKEIKELASGVKAELLSVEEACRLVPSHSARSKFGYGAKEVRSLSSKAINHINSVWEDLLEDNTTPIPTTIMAKNEVFAVAPHKGGRKPARLIVYPDLGVRICEKRALYDVIQKLPSAIMGSAYGFQYSPKQRVEYLLKMWNSKKTPLGFSYDTRCFDSTVTEQDIRVEESIYQACDLKDEARRVITSLTERLYCGGPMFNSKGQHCGYRRCRASGVLPTSFGNTVTCYLKAKAATKAAGIKDPSFLVCGDDLVVIAESAGIDEDKSALRAFTEAMTRYSAPPGDPPQPTYDLELITSCSSNVSVAHDGAGKRYYYLTRDPETPLARAAWETARHTPVNSWLGNIIMYAPTIWVRMVIMTHFFSILQAQEQLEKALDFEMYGAVYSVTPLDLPAIIERLHGLSAFSLHSYSPVELNRVAGALRKLGIPPLRAWRHRARAVRAKLISQGGKAKICGLYLFNWAVRTKAKLTPLPQAGLLDLSRWFTVGAGGNDIYHSVSRARSRHLLLGLLLLTVGVGIFLLPAR

SEQ ID NO: 1739 - protein, 3010 aa, Artificial
  HCV
MSTNPKPQRKTKRNTYRRPQDVKFPGGGQIVGGVYVLPRRGPTLGVRATRKTSERSQPRGRRQPIPKARRPEGRAWAQPGYPWPLYGNEGLGWAGWLLSPRGSRPSWGPTDPRRRSRNLGKVIDTLTCGFADLMGYIPLVGAPLGGAARALAHGVRVLEDGVNYATGNLPGCSFSIFLLALLSCLTIPASAYQVRNASGLYHVTNDCSNSSIVYEAAGMIMHTPGCVPCVRENNASRCWVALTPTLAARNTSIPTTTIRRHVDLLVGAAAFCSAMYVGDLCGSVFLVSQLFTFSPRRYETVQDCNCSIYPGHVSGHRMAWDMMMNWSPTTALVVSQLLRIPQAVVDMVAGAHWGVLAGLAYYSMVGNWAKVLIVMLLFAGVDGVTYTTGGSQARHTQSVTSFFTQGPAQRIQLINTNGSWHINRTALNCNESLNTGFFAALFYAHKFNSSGCPERMASCSSIDKFAQGWGPITYTEPRDLDQRPYCWHYAPRQCGIVPASQVCGPVYCFTPSPVVVGTTDRSGAPTYNWGANETDVLLLNNTRPPQGNWFGCTWMNSTGFTKTCGGPPCNIGGVGNLTLTCPTDCFRKHPEATYTKCGSGPWLTPRCIVDYPYRLWHYPCTVNFTIFKVRMYVGGVEHRLSAACNWTRGERCDLEDRDRSELSPLLLSTTEWQTLPCSFTTLPALSTGLIHLHQNIVDVQYLYGIGSAVVSFVIKWEYIVLLFLLLADARVCACLWMMLLIAQAEAALENLVVLNAASLAGADGILSFLVFFCAAWYIKGRLVPGAAYALYGVWPLLLLLLALPPRAYAMDREMAASCGGVVFVGLILLTLSPHYKVFLARLIWWLQYFITRAEAHLCVWVPPLNVRGGRDAIILLTCAAHPELIFDITKLLLAILGPLMVLQAAITAMPYFVRAQGLIRACMLVRKVAGGHYVQMAFMKLAALTGTYVYDHLTPLQDWAHAGLRDLAVAVEPVVFSDMETKIITWGADTAACGDIILGLPVSARRGREILLGPADSIEGQGWRLLAPITAYAQQTRGLLGCIVTSLTGRDKNQVEGEVQVVSTATQSFLATCVNGVCWTVFHGAGSKTLAGPKGPITQMYTNVDQDLVGWHAPPGARSLTPCTCGSSDLYLVTRHADVIPVRRRGDGRGSLLSPRPVSYLKGSSGGPLLCPSGHAVGIFRAAVCTRGVAKAVDFIPVESMETTMRSPVFTDNSSPPAVPQTFQVAHLHAPTGSGKSTKVPAAYAAQGYKVLVLNPSVAATLGFGAYMSKAHGTDPNIRTGVRTITTGAPITYSTYGKFLADGGCSGGAYDIIICDECHSTDSTTILGIGTVLDQAETAGARLVVLATATPPGSVTVPHPNIEEVALSNTGEIPFYGKAIPLEAIKGGRHLIFCHSKKKCDELAAKLSGLGINAVAYYRGLDVSVIPTSGDVVIVATDALMTGYTGDFDSVIDCNTCVTQTVDFSLDPTFTIETTTVPQDAVSRSQRRGRTGRGRGGIYRFVTPGERPSGMFDSSVLCECYDAGCAWYELTPAETTVRLRAYLNTPGLPVCQDHLEFWESVFTGLTHIDAHFLSQTKQAGDNFPYLVAYQATVCARAQAPPPSWDQMWKCLIRLKPTLHGPTPLLYRLGAVQNEITLTHPITKFIMACMSADLEVVTSTWVLVGGVLAALAAYCLTTGSVVIVGRIILSGRPAVVPDREVLYREFDEMEECASHLPYIEQGMQLAEQFKQKALGLLQTATKQAEAAAPVVESRWRALEAFWAKHMWNFISGIQYLAGLSTLPGNPAIASLMAFTASITSPLTTQNTLLFNILGGWVAAQLAPPSAASAFVGAGIAGAAIGSIGLGKVLVDILAGYGAGVAGALVAFKVMSGEAPSAEDLVNLLPAILSPGALVVGVVCAAILRRHVGPGEGAVQWMNRLIAFASRGNHVSPTHYVPESDAAARVTQILSSLTITQLLKRLHQWINEDCSTPCSGSWLKDVWDWICTVLTDFKTWLQSKLLPKLPGVPFFSCQRGYKGVWRGDGIMQTTCPCGAQITGHVKNGSMRIVGPKTCSNTWHGTFPINAYTTGPCTPSPAPNYSRALWRVAAEEYVEITRVGDFHYVTGMTTDNVKCPCQVPAPEFFTELDGVRLHRYAPACRPLLREDVTFQVGLNQYLVGSQLPCEPEPDVAVLTSMLTDPSHITAETAKRRLARGSPPSLASSSASQLSAPSLKATCTTHHDSPDADLIEANLLWRQEMGGNITRVESENKVVILDSFDPLRAEEDEREVSVAAEILRKSKKFPPALPIWARPDYNPPLLESWKSPDYVPPAVHGCPLPPTTGPPIPPPRKKRTVVLTESTVSSALAELATKTFGSSGSSAVDSGTATAPPDQTSDDGDKESDVESYSSMPPLEGEPGDPDLSDGSWSTVSGEASDDIVCCSMSYTWTGALITPCAAEESKLPINALSNSLLRHHNMVYATTSRSASLRQKKVTFDRLQVLDDHYRDVLKEMKAKASTVKAKLLSVEEACKLTPPHSAKSKFGYGAKDVRNLSSKAINHIRSVWKDLLEDTETPIDTTIMAKSEVFCVQPEKGGRKPARLIVFPDLGVRVCEKMALYDVVSTLPQAVMGSSYGFQYSPGQRVEFLVNAWKSKKSPMGFSYDTRCFDSTVTESDIRVEESIYQCCDLAPEARQAIKSLTERLYIGGPLTNSKGQNCGYRRCRASGVLTTSCGNTLTCYLKATAACRAAKLQDCTMLVNGDDLVVICESAGTQEDAASLRVFTEAMTRYSAPPGDPPQPEYDLELITSCSSNVSVAHDASGKRVYYLTRDPTTPLARAAWETARHTPVNSWLGNIIMYAPTLWARMILMTHFFSILLAQEQLEKALDCQIYGACYSIEPLDLPQIIQRLHGLSAFSLHSYSPGEINRVASCLRKLGVPPLRVWRHRARSVRARLLSQGGRAATCGKYLFNWAVRTKLKLTPIPAASQLDLSSWFVAGYSGGDIYHSLSRARPRWFMWCLLLLSVGVGIYLLPNR

SEQ ID NO: 1740 - protein, 3010 aa, Artificial
  HCV
  misc_feature (1033)..(1033): Xaa can be any naturally occurring amino acid
  misc_feature (1247)..(1247): Xaa can be any naturally occurring amino acid
  misc_feature (2105)..(2105): Xaa can be any naturally occurring amino acid
MSTNPKPQRKTKRNTYRRPQDVKFPGGGQIVGGVYVLPRRGPTLGVRATRKTSERSQPRGRRQPIPKARRPEGRAWAQPGYPWPLYGNEGLGWAGWLLSPRGSRPSWGPTDPRRRSRNLGKVIDTLTCGFADLMGYIPLVGAPLGGAARALAHGVRVLEDGVNYATGNLPGCSFSIFLLALLSCLTIPASAYQVRNRSGLYHVTNDCSNSSIVYEAAGMIMHTPGCVPCVRENNVSRCWVALTPTLAARNTSIPTTTIRRHVDLLVGAAAFCSAMYVGDLCGSVFLVSQLFTFSPRRYETVQDCNCSIYPGHVSGHRMAWDMMMNWSPTTALVVSQLLRIPQAVVDMVAGAHWGVLAGLAYYSMVGNWAKVLIVMLLFAGVDGVTYTTGGSQARHTQGVASFFTPGPAQKIQLINTNGSWHINRTALNCNESLNTGFFAALFYAHKFNSSGCPERMASCSSIDKFAQGWGPITYTEPGDLDQRPYCWHYAPRQCGIVPASQVCGPVYCFTPSPVVVGTTDRSGAPTYNWGANETDVLLLNNTRPPQGNWFGCTWMNSTGFTKTCGGPPCNIGGVGNLTLTCPTDCFRKHPEATYTKCGSGPWLTPRCIVDYPYRLWHYPCTVNFTIFKVRMYVGGVEHRLSAACNWTRGERCDLEDRDRSELSPLLLSTTEWQTLPCSFTTLPALSTGLIHLHQNIVDVQYLYGIGSAVVSFVIKWEYIVLLFLLLADARVCACLWMMLLIAQAEAALENLVVLNAASLAGAHGILSFLVFFCAAWYIKGRLVPGAAYALYGVWPLLLLLLALPPRAYAMDREMAASCGGVVFLGLILLTLSPHYKVFLARLIWWLQYFITRAEAHLCVWVPPLNVRGGRDAIILLTCAAHPELIFDITKLLLAILGPLMVLQAAITAMPYFVRAQGLIRACMLVRKVAGGHYVQMAFMKLAALTGTYVYDHLTPLQDWAHAGLRDLAVAVEPVVFSDMETKIITWGADTAACGDIILGLPVSARREREILLGPADSIEGQGWRLLAPITAYXQQTRGLLGCIVTSLTGRDKNQVEGEVQVVSTATQSFLATCVNGVCWTVFHGAGSKTLAGPKGPITQMYTNVDQDLVGWHAPPGARSLTPCTCGSSDLYLVTRHADVIPVRRRGDGRGSLLSPRPVSYLKGSSGGPLLCPSGHAVGIFRAAVCTRGVAKAVDFIPVESMETTMRSPVFTDNSSPPAVPQTFQVAHLHAPTGSGKSTKVPAAYAAXGYKVLVLNPSVAATLGFGAYMSKAHGTDPNIRTGVRTITTGGPITYSTYGKFLADGGCSGGAYDIIICDECHSTDSTTILGIGTVLDQAETAGARLVVLATATPPGSVTVPHPNIEEVALSNTGEIPFYGKAIPIEVIKGGRHLIFCHSKKKCDELAAKLSGLGINAVAYYRGLDVSVIPTSGDVVVVATDALMTGYTGDFDSVIDCNTCVTQTVDFSLDPTFTIETTTVPQDAVSRSQRRGRTGRGRGGIYRFVTPGERPSGMFDSSVLCECYDAGCAWYELTPAETTVRLRAYLNTPGLPVCQDHLEFWESVFTGLTHIDAHFLSQTKQAGDNFPYLVVYQATVCARAQAPPPSWDQMWKCLIRLKPTLHGPTPLLYRLGAVQNEITLTHPITKFIMACMSADLEVVTSTWVLVGGVLAALAAYCLTTGSVVIVGRIILSGRPAVVPDREVLYREFDEMEECASHLPYIEQGMQLAEQFKQKALGLLQTATKQAEAAAPVVESRWRALEAFWAKHMWNFISGIQYLAGLSTLPGNPAIASLMAFTASITSPLTTQNTLLFNILGGWVAAQLAPPSAASAFVGAGIAGAAIGSIGLGKVLVDILAGYGAGVAGALVAFKVMSGEAPSAEDLVNLLPAILSPGALVVGVVCAAILRRHVGPGEGAVQWMNRLIAFASRGNHVSPTHYVPESDAAARVTQILSSLTITQLLKRLHQWINEDCSTPCSGSWLRDVWDWICTVLTDFKTWLQSKLLPQLPGVPFFSCQRGYKGVWRGDGIMQTTCPCGAQITGHVKNGSMRIVGPKTCSNMWHGTFPINAYTTGPCTPSPAPNYSRALWRVAAEEYVEITRVGDFHYVTGXTTDNVKCPCQVPAPEFFTELDGVRLHRYAPACRPLLREDVTFQVGLNQYLVGSQLPCEPEPDVAVLTSMLTDPSHITAETAKRRLARGSPPSLASSSASQLSAPSLKATCTTHHDSPDADLIEANLLWRQEMGGNITRVESENKVVILDSFDPLRAEEDEREVSVAAEILRKSKKFPPALPIWARPDYNPPLLESWKSPDYVPPAVHGCPLPPTTGPPIPPPRKKRTVVLTESTVSSALAELATKTFGSSGSSAVDSGTATAPPDQTSDDGDKESDVESYSSMPPLEGEPGDPDLSDGSWSTVSGEASDDIVCCSMSYTWTGALITPCAAEESKLPINALSNSLLRHHNMVYATTSRSASLRQKKVTFDRLQVLDDHYRDVLKEVKAKASTVKAKLLSVEEACKLTPPHSAKSKFGYGAKDVRNLSSKAINHIRSVWKDLLEDTETPIDTTIMAKSEVFCVQPEKGGRKPARLIVFPDLGVRVCEKMALYDVVSTLPQAVMGSSYGFQISPGQRVEFLVNAWKSKKSPMGFSYDTRCFDSTVTESDIRVEESIYQCCDLAPEARQAIKSLTERLYIGGPLTNSKGQNCGYRRCRASGVLTTSCGNTLTCYLKATAACRAAKLQDCTMLVNGDDLVVICESAGTQEDAASLRVFTEAMTRYSAPPGDPPQPEYDLELITSCSSNVSVAHDASGKRVYYLTRDPTTPLARAAWETARHTPVNSWLGNIIMYAPTLWARMILMTHFFSILLAQEQLEKALDCQIYGACYSIEPLDLPQIIQRLHGLSAFSLHSYSPGEINRVASSLRKLGVPPLRVWRHRARSVRARLLSQGGRAATCGKYLFNWAVRTKLKLTPIPAASQLDLSSWFVAGYSGGDIYHSLSRARPRWFMWCLLLLSVGVGIYLLPNR

SEQ ID NO: 1741 - protein, 3021 aa, Artificial
  HCV
MSTLPKPQRKTKRNTIRRPQDVKFPGGGVIYVGVYVLPRRGPRLGVRATRKTSERSQPRGRRKPIPKARRSEGRSWAQPGYPWPLYGNEGCGWAGWLLSPRGSRPNWAPNDPRRRSRNLGKVIDTLTCGFADLMGYIPLVGAPLGGAARALAHGVRALEDGINFATGNLPGCSFSIFLLALFSCLIHPAASLEWRNTSGLYVLTNDCSNSSIVYEADDVILHTPGCIPCVQDGNTSTCWTPVTPTVAVRYVGATTASIRSHVDLLVGAGTMCSALYVGDMCGPVFLVGQAFTFRPRRHRTVQTCNCSLYPGHLSGQRMAWDMMMNWSPAVGMVVAHILRLPQTLFDVVAGAHWGIIAGLAYYSMQGNWAKVAIIMVMFSGVDASTHVTAGQAARNAYGITSLFSVGAKQNLQLINTNGSWHINRTALNCNESINTGFIAGLFYYHKFNSTGCPQRLSSCKPITFFKQGWGPLTDANITGPSDDKPYCWHYAPRPCGIVPALNVCGPVYCFTPSPVVVGTTDAKGAPTYTWGANKTDVFLLESLRPPSGRWFGCTWMNSTGFVKTCGAPPCNIYGDGRDAQNESDLFCPTDCFRKHPEATYSRCGAGPWLTPRCLVDYPYRLWHYPCTVNFTLFKVRMFVGGFEHRFTAACNWTRGERCDIEDRDRSEQHPLLHSTTELAILPCSFTPMPALSTGLIHLHQNIVDVQYLYGIGSGMVGWALKWEFVILIFLLLADARVCVALWLILTISQAEAALENLVTLNAVAAAGTHGIGWYLVAFCAAWYVRGKLVPLVTYSLTGLWSLALLVLLLPQRAYAWSGEDSATLGAGILVLFGFFTLSPWYKHWIARLIWWNQYTICRCESALHVWVPPLLARGGRDGVILLTSLLYPSLIFDITKLLIAALGPLYLIQATITATPYFVRAHVLVRLCMLVRSVMGGKYFQMIILSLADGSNTYLYDHLAPMQHWAAAGLKDLAVATEPVIFSPMEIKVITWGADTAACGDILCGLPVSARLGREVLLGPADDYREMGWRLLAPITAYAQQTRGLLGTIVTSLTGRDKNVVAGEVQVLSTATQTFLGTTVGGVMWTVYHGAGSRTLAGVKHPALQMYTNVDQDLVGWPAPPGAKSLEPCTCGSADLYLVTRDADVIPARRRGDSTASLLSPRPLARLKGSSGGPVMCPSGHVAGIFRAAVCTRGVAKALQFIPVETLSTQARSPSFSDNSTPPAVPQSYQVGYLHAPTGSGKSTKVPAAYVAQGYNVLVLNPSVAATLGFGSFMSRAYGIDPNIRTGNRTVTTGAKLTYSTYGKFLAGGGCSGGAYDVIICDDCHAQDATSILGIGTVLDQAETAGVRLTVLATATPPGSITVPHSNIEEVALGSEGEIPFYGKAIPIACIKGGRHLIFCHSKKKCDKMASKLRGMGLNAVAYYRGLDVSVIPTTGDVVVCATDALMTGFTGDFDSVIDCNVAVEQYVDFSLDPTFSIETCTAPQDAVSRSQRRGRTGRGRLGTYRYVTPGERPSGMFDSVVLCECYDAGCSWYDLQPAETTVRLRAYLSTPGLPVCQDHLDLWESVFTGLTHIDAHFLSQTKQAGLNFSYLTAYQATVCARAQAPPPSWDETWKCLVRLKPTLHGPTPLLYRLGPVQNEICLTHPITKYVMACMSADLEVTTSTWVLLGGVLAAVAAYCLSVGCVVIVGHIELGGKPALVPDKEVLYQQYDEMEECSQARPYIEQAQVIAHQFKEKVLGLLQRATQQQAVIEPIVVSNWQKLEVLWHKHMWNFVSGIQYLAGLSTLPGNPAVASLMAFTASVTSPLTTNQTMFFNILGGWVATHLAGPQASSAFVVSGLAGAAIGGIGLGRVLLDILAGYGAGVSGALVAFKIMGGEPPTTEDMVNLLPAILSPGALVVGVICAAILRRHVGPGEGPVQWMNRLIAFASRGNHVSPAHYVPESDAAARVTALLSSLTVTSLLRRLHQWINEDYPSPCSGDWLRIIWDWVCSVVSDFKTWLSAKIMPALPGLPFISCQKGYKGVWRGDGVMSTRCPCGASIAGHVKNGSMRLAGPRTCANMCHGTFPINEYTTGPSTPCPPPNYTRALWRVAANSYVEVRRVGDFHYITGATEDGLKCPCQVPATEFFTEVDGVRIHRYAPPCRPLLRDEITFMVGLNSYAIGSQLPCEPEPDVSVLTSMLRDPSHITAETAARRLARGSPPSEASSSASQLSAPSLKATCQTHRPHPDAELVDANLLWRQEMGSNITRVESETKVVILDSFEPLRAETDDAELSAAAECFKKPPKYPPALPIWARPDYNPPLLDRWKSPDYVPPTVHGCALPPKGAPPVPPPRRKRTIQLDGSNVSAALAALAEKSFPSSKPQEENSSSSGVDTQSSTASKVLPSPGEESDSESCSSMPPLEGEPGDPDLSCDSWSTVSDSEEQSVVCCSMSYSWTGALITPCSAEEEKLPISPLSNSLLRHHNLVYSTSSRSASQRQKKVTFDRLQVLDDHYKTALQEVKERASRVKARMLSIEEACALVPPHSARSKFGYSAKDVRSLSSKAINQIRSVWEDLLEDTTTPIPTTIMAKNEVFCVDPAKGGRKAARLIVYPDLGVRVCEKRALYDVIQRLSIETMGSAYGFQYSPRQRVERLLKMWTSKKTPLGFSYDTRCFDSTVTGQDIRVEEAVYQCCNLEPEPGQAISSLTERLYCGGPMNNSKGAQCGYLRCRASGVLPTSFGNTITCYIKATAAARAAGLRNPDFLVCGDDLVVVAESDGVDEDRATLRAFTEAMTRYSAPPGDAPQPTYDLELITSCSSNVSVARDDKGKRYYYLTRDATTPLARAAWETARHTPVNSWLGSIIMYAPTIWVRMVMMTHFFSILQSQEILDRPLDFEMYGATYSVTPLDLPAIIERLHGLSAFSVHSYSPVELNRVAGTLRKLGCPPLRAWRHRARAVRAKLIAQGGRAKICGLYLFNWAVRTKTKLTPLPAAGQLDLSSWFTVGVGGNDIYHSVSRARTRYLLLCLLLLTVGVGIFLLPAR

SEQ ID NO: 1742 - protein, 3011 aa, Artificial
  HCV
MSTNPKPQKKNKRNTNRRPQDVKFPGGGQIVGGVYLLPRRGPRLGVRATRKTSERSQPRGRRQPIPKARRPEGRTWAQPGYPWPLYGNEGCGWAGWLLSPRGSRPSWGPTDPRRRSRNLGKVIDTLTCGFADLMGYIPLVGAPLGGAARALAHGVRVLEDGVNYATGNLPGCSFSIFLLALLSCLTVPASAYQVRNSTGLYHVTNDCPNSSIVYEAADAILHTPGCVPCVREGNASRCWVAMTPTVATRDGKLPATQLRRHIDLLVGSATLCSALYVGDLCGSVFLVGQLFTFSPRRHWTTQGCNCSIYPGHITGHRMAWDMMMNWSPTTALVMAQLLRIPQAILDMIAGAHWGVLAGIAYFSMVGNWAKVLVVLLLFAGVDAETHVTGGSAGHTVSGFVSLLAPGAKQNVQLINTNGSWHLNSTALNCNDSLNTGWLAGLFYHHKFNSSGCPERLASCRPLTDFDQGWGPISYANGSGPDQRPYCWHYPPKPCGIVPAKSVCGPVYCFTPSPVVVGTTDRSGAPTYSWGENDTDVFVLNNTRPPLGNWFGCTWMNSTGFTKVCGAPPCVIGGAGNNTLHCPTDCFRKHPDATYSRCGSGPWITPRCLVDYPYRLWHYPCTINYTIFKIRMYVGGVEHRLEAACNWTRGERCDLEDRDRSELSPLLLTTTQWQVLPCSFTTLPALSTGLIHLHQNIVDVQYLYGVGSSIASWAIKWEYVVLLFLLLADARVCSCLWMMLLISQAEAALENLVILNAASLAGTHGLVSFLVFFCFAWYLKGKWVPGAVYTFYGMWPLLLLLLALPQRAYALDTEVAASCGGVVLVGLMALTLSPYYKRYISWCLWWLQYFLTRVEAQLHVWIPPLNVRGGRDAVILLMCAVHPTLVFDITKLLLAVFGPLWILQASLLKVPYFVRVQGLLRFCALARKMIGGHYVQMVIIKLGALTGTYVYNHLTPLRDWAHNGLRDLAVAVEPVVFSQMETKLITWGADTAACGDIINGLPVSARRGREILLGPADGMVSKGWRLLAPITAYAQQTRGLLGCIITSLTGRDKNQVEGEVQIVSTAAQTFLATCINGVCWTVYHGAGTRTIASPKGPVIQMYTNVDQDLVGWPAPQGSRSLTPCTCGSSDLYLVTRHADVIPVRRRGDSRGSLLSPRPISYLKGSSGGPLLCPAGHAVGIFRAAVCTRGVAKAVDFIPVENLETTMRSPVFTDNSSPPVVPQSFQVAHLHAPTGSGKSTKVPAAYAAQGYKVLVLNPSVAATLGFGAYMSKAHGIDPNIRTGVRTITTGSPITYSTYGKFLADGGCSGGAYDIIICDECHSTDATSILGIGTVLDQAETAGARLVVLATATPPGSVTVPHPNIEEVALSTTGEIPFYGKAIPLEVIKGGRHLIFCHSKKKCDELAAKLVALGINAVAYYRGLDVSVIPTSGDVVVVATDALMTGYTGDFDSVIDCNTCVTQTVDFSLDPTFTIETITLPQDAVSRTQRRGRTGRGKPGIYRFVAPGERPSGMFDSSVLCECYDAGCAWYELTPAETTVRLRAYMNTPGLPVCQDHLEFWEGVFTGLTHIDAHFLSQTKQSGENLPYLVAYQATVCARAQAPPPSWDQMWKCLIRLKPTLHGPTPLLYRLGAVQNEITLTHPVTKYIMTCMSADLEVVTSTWVLVGGVLAALAAYCLSTGCVVIVGRVVLSGKPAIIPDREVLYREFDEMEECSQHLPYIEQGMMLAEQFKQKALGLLQTASRQAEVIAPAVQTNWQKLETFWAKHMWNFISGIQYLAGLSTLPGNPAIASLMAFTAAVTSPLTTSQTLLFNILGGWVAAQLAAPGAATAFVGAGLAGAAIGSVGLGKVLIDILAGYGAGVAGALVAFKIMSGEVPSTEDLVNLLPAILSPGALVVGVVCAAILRRHVGPGEGAVQWMNRLIAFASRGNHVSPTHYVPESDAAARVTAILSSLTVTQLLRRLHQWISSECTTPCSGSWLRDIWDWICEVLSDFKTWLKAKLMPQLPGIPFVSCQRGYKGVWRVDGIMHTRCHCGAEITGHVKNGTMRIVGPRTCRNMWSGTFPINAYTTGPCTPLPAPNYTFALWRVSAEEYVEIRQVGDFHYVTGMTTDNLKCPCQVPSPEFFTELDGVRLHRFAPPCKPLLREEVSFRVGLHEYPVGSQLPCEPEPDVAVLTSMLTDPSHITAEAAGRRLARGSPPSVASSSASQLSAPSLKATCTANHDSPDAELIEANLLWRQEMGGNITRVESENKVVILDSFDPLVAEEDEREISVPAEILRKSRRFAQALPVWARPDYNPPLVETWKKPDYEPPVVHGCPLPPPKSPPVPPPRKKRTVVLTESTLSTALAELATRSFGSSSTSGITGDNTTTSSEPAPSGCPPDSDAESYSSMPPLEGEPGDPDLSDGSWSTVSSEANAEDVVCCSMSYSWTGALVTPCAAEEQKLPINALSNSLLRHHNLVYSTTSRSACQRQKKVTFDRLQVLDSHYQDVLKEVKAAASKVKANLLSVEEACSLTPPHSAKSKFGYGAKDVRCHARKAVTHINSVWKDLLEDNVTPIDTTIMAKNEVFCVQPEKGGRKPARLIVFPDLGVRVCEKMALYDVVTKLPLAVMGSSYGFQYSPGQRVEFLVQAWKSKKTPMGFSYDTRCFDSTVTESDIRTEEAIYQCCDLDPQARVAIKSLTERLYVGGPLTNSRGENCGYRRCRASGVLTTSCGNTLTCYIKARAACRAAGLQDCTMLVCGDDLVVICESAGVQEDAASLRAFTEAMTRYSAPPGDPPQPEYDLELITSCSSNVSVAHDGAGKRVYYLTRDPTTPLARAAWETARHTPVNSWLGNIIMFAPTLWARMILMTHFFSVLIARDQLEQALDCEIYGACYSIEPLDLPPIIQRLHGLSAFSLHSYSPGEINRVAACLRKLGVPPLRAWRHRARSVRARLLARGGRAAICGKYLFNWAVRTKLKLTPIAAAGQLDLSGWFTAGYSGGDIYHSVSHARPRWIWFCLLLLAAGVGIYLLPNR

SEQ ID NO: 1743 - protein, 3033 aa, Artificial
  HCV
MSTNPKPQRKTKRNTNRRPQDVKFPGGGQIVGGVYLLPRRGPRLGVRATRKTSERSQPRGRRQPIPKDRRSTGKSWGKPGYPWPLYGNEGLGWAGWLLSPRGSRPSWGPNDPRHRSRNVGKVIDTLTCGFADLMGYIPVVGAPLGGVARALAHGVRVLEDGVNFATGNLPGCSFSIFLLALLSCITTPVSAAEVKNISTGYMVTNDCTNDSITWQLQAAVLHVPGCVPCEKVGNTSRCWIPVSPNVAVQQPGALTQGLRTHIDMVVMSATLCSALYVGDLCGGVMLAAQMFIVSPQHHWFVQDCNCSIYPGTITGHRMAWDMMMNWSPTATMILAYAMRVPEVIIDIIGGAHWGVMFGLAYFSMQGAWAKVVVILLLAAGVDAQTHTVGGSTAHNARTLTGMFSLGARQKIQLINTNGSWHINRTALNCNDSLHTGFLASLFYTHSFNSSGCPERMSACRSIEAFRVGWGALQYEDNVTNPEDMRPYCWHYPPRQCGVVSASSVCGPVYCFTPSPVVVGTTDRLGAPTYTWGENETDVFLLNSTRPPQGSWFGCTWMNSTGYTKTCGAPPCRIRADFNASMDLLCPTDCFRKHPDTTYIKCGSGPWLTPRCLIDYPYRLWHYPCTVNYTIFKIRMYVGGVEHRLTAACNFTRGDRCNLEDRDRSQLSPLLHSTTEWAILPCTYSDLPALSTGLLHLHQNIVDVQFMYGLSPALTKYIVRWEWVVLLFLLLADARVCACLWMLILLGQAEAALEKLVVLHAASAASCNGFLYFVIFFVAAWYIKGRVVPLATYSLTGLWSFGLLLLALPQQAYAYDASVHGQIGAALLVLITLFTLTPGYKTLLSRFLWWLCYLLTLAEAMVQEWAPPMQVRGGRDGIIWAVAIFCPGVVFDITKWLLAVLGPAYLLKGALTRVPYFVRAHALLRMCTMVRHLAGGRYVQMVLLALGRWTGTYIYDHLTPMSDWAANGLRDLAVAVEPIIFSPMEKKVIVWGAETAACGDILHGLPVSARLGREVLLGPADGYTSKGWSLLAPITAYAQQTRGLLGTIVVSMTGRDKTEQAGEIQVLSTVTQSFLGTTISGVLWTVYHGAGNKTLAGSRGPVTQMYSSAEGDLVGWPSPPGTKSLEPCTCGAVDLYLVTRNADVIPARRRGDKRGALLSPRPLSTLKGSSGGPVLCPRGHAVGVFRAAVCSRGVAKSIDFIPVETLDIVTRSPTFSDNSTPPAVPQTYQVGYLHAPTGSGKSTKVPVAYAAQGYKVLVLNPSVAATLGFGAYLSKAHGINPNIRTGVRTVTTGAPITYSTYGKFLADGGCAGGAYDIIICDECHAVDSTTILGIGTVLDQAETAGVRLTVLATATPPGSVTTPHPNIEEVALGQEGEIPFYGRAIPLSYIKGGRHLIFCHSKKKCDELAAALRGMGLNAVAYYRGLDVSVIPTQGDVVVVATDALMTGFTGDFDSVIDCNVAVTQVVDFSLDPTFTITTQTVPQDAVSRSQRRGRTGRGRLGIYRYVSTGERASGMFDSVVLCECYDAGAAWYELTPAETTVRLRAYFNTPGLPVCQDHLEFWEAVFTGLTHIDAHFLSQTKQSGENFAYLTAYQATVCARAKAPPPSWDVMWKCLTRLKPTLVGPTPLLYRLGSVTNEVTLTHPVTKYIATCMQADLEVMTSTWVLAGGVLAAVAAYCLATGCVCIIGRLHVNQRAVVAPDKEVLYEAFDEMEECASRAALIEEGQRIAEMLKSKIQGLLQQASKQAQDIQPAVQASWPKVEQFWAKHMWNFISGIQYLAGLSTLPGNPAVASMMAFSAALTSPLSTSTTILLNILGGWLASQIAPPAGATGFVVSGLVGAAVGSIGLGKVLVDILAGYGAGISGALVAFKIMSGEKPSMEDVVNLLPGILSPGALVVGVICAAILRRHVGPGEGAVQWMNRLIAFASRGNHVAPTHYVTESDASQRVTQLLGSLTITSLLRRLHNWITEDCPIPCSGSWLRDVWDWVCTILTDFKNWLTSKLFPKMPGLPFISCQKGYKGVWAGTGIMTTRCPCGANISGNVRLGSMRITGPKTCMNIWQGTFPINCYTEGQCVPKPAPNFKIAIWRVAASEYAEVTQHGSYHYITGLTTDNLKVPCQLPSPEFFSWVDGVQIHRFAPIPKPFFRDEVSFCVGLNSFVVGSQLPCDPEPDTDVLTSMLTDPSHITAETAARRLARGSPPSEASSSASQLSAPSLRATCTTHGKAYDVDMVDANLFMGGDVTRIESESKVVVLDSLDPMVEERSDLEPSIPSEYMLPKKRFPPALPAWARPDYNPPLVESWKRPDYQPATVAGCALPPPKKTPTPPPRRRRTVGLSESSIADALQQLAIKSFGQPPPSGDSGLSTGADAADSGSRTPPDELALSETGSISSMPPLEGEPGDPDLEPEQVELQPPPQGGVVTPGSGSGSWSTCSEEDDSVVCCSMSYSWTGALITPCSPEEEKLPINPLSNSLLRYHNKVYCTTSKSASLRAKKVTFDRMQALDAHYDSVLKDIKLAASKVTARLLTLEEACQLTPPHSARSKYGFGAKEVRSLSGRAVNHIKSVWKDLLEDTQTPIPTTIMAKNEVFCVDPTKGGKKAARLIVYPDLGVRVCEKMALYDITQKLPQAVMGASYGFQYSPAQRVEFLLKAWAEKKDPMGFSYDTRCFDSTVTERDIRTEESIYRACSLPEEAHTAIHSLTERLYVGGPMFNSKGQTCGYRRCRASGVLTTSMGNTITCYVKALAACKAAGIIAPTMLVCGDDLVVISESQGTEEDERNLRAFTEAMTRYSAPPGDPPRPEYDLELITSCSSNVSVALGPQGRRRYYLTRDPTTPIARAAWETVRHSPVNSWLGNIIQYAPTIWARMVLMTHFFSILMAQDTLDQNLNFEMYGAVYSVSPLDLPAIIERLHGLDAFSLHTYTPHELTRVASALRKLGAPPLRAWKSRARAVRASLISRGGRAAVCGRYLFNWAVKTKLKLTPLPEARLLDLSSWFTVGAGGGDIYHSVSRARPRLLLLGLLLLFVGVGLFLLPAR

SEQ ID NO: 1744 - protein, 3010 aa, Artificial
  HCV
MSTNPKPQRKIKRNTNRRPQDVKFPGGGQIVGGVYLLPRRGPRLGVRATRKTSERPQPRGRRQPIPKARQPEGRAWAQPGYPWPLYGNEGLGWAGWLLSPRGSRPSWGPTDPRRRSRNLGKVIDTLTCGFADLMGYIPLVGAPLGGAARALAHGVRVLEDGVNYATGNLPGCSFSIFLLALLSCLTIPASAYQVRNASGVYHVTNDCSNSSIVYEAADVIMHTPGCVPCVRENNSSRCWVALTPTLAARNSSIPTTTIRRHVDLLVGAAALCSAMYVGDFCGSVFLVSQLFTFSPRRYETVQDCNCSIYPGHVSGHRMAWDMIMNWSPTTALVVSQLLRIPQAVVDMVAGAHWGVLAGLAYYSMVGNWAKVLVVMLLFAGVDGGTHVTGGKVAYTTQGFTSFFSRGPSQKIQLVNTNGSWHINRTALNCNDSLNTGFLAALFYTHSFNASGCPERMAGCRPIDEFAQGWGPITHVVPNISDQRPYCWHYAPRPCGIVPASQVCGPVYCFTPSPVVVGTTDRFGAPTYNWGNNETDVLLLNNTRPPQGNWFGCTWMNGTGFTKTCGGPPCNIGGVGNNTLTCPTDCFRKHPEATYTKCGSGPWLTPRCLVHYPYRLWHYPCTVNFTIFKVRMYVGGVEHRLEAACNWTRGERCDLEDRDRSELSPLLLSTTEWQVLPCSFTTLPALSTGLIHLHQNIVDVQYLYGIGSAVVSFAIKWEYILLLFLPLADARVCAWLWMMLLIAQAEAALENLVVLNAASMAGAHGILSFLVFFCAAWYIKGRLVPGAAYAFYGVWPLLLLLMALPARAYAMDREMAASCGGAVFVGLVLLTLSPYYKVFLAKLIWWLQYLITRAEAHLQVWIPPLNVRGGRDAIILLTCAVHPELIFDITKLLLAILGPLMVLQAGLTQMPYFVRAQGLIRMCMLVRKAAGGHYVQMALMKLAALTGTYVYDHLTPLQDWAHAGLRDLAVAVEPVVFSDMETKIITWGAETAACGDIISSLPVSARRGRELLLGPADSFDGQGWRLLAPITAYSQQTRGLLGCIITSLTGRDKNQVEGEVQVVSTATQSFLATCINGVCWTVFHGAGSKTLAGPKGPITQMYTNVDQDLVGWSAPPGARSLTPCTCGSSDLYLVTRHADVIPVHRRGDSRGSLLSPGPISYLKGSSGGPLPCPSGRVVGIFRAAVCTRGVAKAVDFVPVESMETTMRSPVFTDNSTPPAVPQTFQVAHLHAPTGSGKSTRVPAAYAAQGYKVLVLNPSVAATLGFGAYMSKAHGVDPNIRTGVRTITTGAPITYSTYGKFLADGGCSGGAYDIIICDECHSTDSTSILGIGTVLDQAETAGARLVVLATATPPGSVTVPHPNIEEVALSNTGEIPFYGKAIPLEAIKGGRHLIFCHSKKKCDELAAKLSALGVNAVAYYRGLDVSIIPTSGDVVVVATDALMTGYTGDFDSVIDCNTCVTQTVDFSLDPTFTIETTTVPQDAVSRSQRRGRTGRGRGGIYRFVTPGERPSGMFDSSVLCECYDAGCAWYELTPAETSVRLRAYLNTPGLPVCQDHLEFWESVFTGLTHIDAHFLSQTKQAGDNFPYLVAYQATVCARAKAPPPSWDQMWKCLIRLKPTLHGPTPLLYRLGAVQNEVTLTHPITKFIMACMSADLEVVTSTWVLVGGVLAALAAYCLTTGSVVIVGRIILSGRPAVIPDREVLYQEFDEMEECASHLPYIEQGMQLAEQFKQKALGLLQTATKQAEAAAPVVESKWRALETFWAKHMWNFISGIQYLAGLSTLPGNPAIASLMAFTASITSPLTTQYTLLFNILGGWVAAQLAPPSAASAFVGAGIAGAAVGSIGLGKVLVDILAGYGAGVAGALVAFKVMSGDMPSTEDLVNLLPAILSPGALVVGVVCAAILRRHVGPGEGAVQWMNRLIAFASRGNHVSPTHYVPESDAAARVTQILSNLTITQLLKRLHQWINEDCSTPCSGSWLRDVWDWICTVLADFKTWLQSKLLPRLPGVPFFSCQRGYKGVWRGDGIMYTTCPCGAQITGHVKNGSMRIVGPRTCSNTWHGTFPINAYTTGPCTPSPAPNYSRALWRVAAEEYVEVTRVGDFHYVTGMTTDNVKCPCQVPAPEFFTELDGVRLHRYAPACKPLLRDEVTFQVGLNQYTVGSQLPCEPEPDVTVVTSMLTDPSHITAEAARRRLARGSPPSLASSSASQLSALSLKATCTTHHGAPDTDLIEANLLWRQEMGGNITRVESENKIVILDSFEPLRAEEDEREVSVAAEILRKTRKFPAAMPVWARPDYNPPLLESWKNPDYVPPVVHGCPLPPTKAPPIPPPRRKRTVVLTESTVSSALAELATKTFGSSGSSAVDSGTATGPPDQASAEGDAGSDAESYSSMPPLEGEPGDPDLNDGSWSTVSEEASEDVVCCSMSYTWTGALITPCAAEESKLPINALSNPLLRHHNMVYATTSRSASQRQKKVTFDRLQVLDDHYRDVLKDMKAKASTVKAKLLSVEEACKLTPPHSARSKFGYGAKDVRSLSSKAVNHIRSVWKDLLEDTETPIDTTIMAKNEVFCVQPEKGGRKPARLIVFPDLGVRVCEKMALYDVVSTLPQAVMGSSYGFQYSPGQRVEFLVNAWKSKKSPMGFAYDTRCFDSTVTENDIRTEESIYQCCDLDPEARQAIRSLTERLYIGGPLTNSKGQNCGYRRCRVSGVLTTSCGNTLTCYLKASAACRAAKLQDCTMLVCGDDLVVICDSAGTQEDAASLRVFTEAMTRYSAPPGDPPQPEYDLELITSCSSNVSVAHDASGKRVYYLTRDPTTPLARAAWETARHTPVNSWLGNIIMYAPTLWARMILMTHFFSILLAQEQLEKALDCQIYGATYSIEPLDLPQIIQRLHGLSAFSLHSYSPGEINRVASCLRKLGVPPLRVWRHRARSVRAKLLSQGGRAATCGKYLFNWAVKTKLKLTPIPEASQLDLSGWFVAGYSGGDIYHSLSRARPRWFMWCLLLLSVGVGIYLLPNR

SEQ ID NO: 1745 - protein, 3010 aa, Artificial
  HCV
MSTNPKPQRKTKRNTNRRPQDIKFPGGGQIVGGVYLLPRRGPRLGVRATRKTSERSQPRGRRQPIPKARRPEGRAWAQPGYPWPLYGNEGLGWAGWLLSPRGSRPSWGPTDPRRKSRNLGKVIDTLTCGFADLMGYIPLVGAPLGGVARALAHGVRVLEDGVNYATGNLPGCSFSIFLLALLSCLTTPVSAYEVRNASGMYHVTNDCSNSSIVYEAADMIMHTPGCVPCVREDNSSRCWVALTPTLAARNASVPTTTLRRHVDLLVGVAAFCSAMYVGDLCGSVFLVSQLFTFSPRRHETVQDCNCSIYPGRVSGHRMAWDMMMNWSPTTALVVSQLLRIPQAVVDMVTGSHWGILAGLAYYSMVGNWAKVLIAMLLFAGVDGTTHVTGGAQGRAASSLTSLFSPGPVQHLQLINTNGSWHINRTALSCNDSLNTGFVAALFYKYRFNASGCPERLATCRPIDTFAQGWGPITYTEPHDLDQRPYCWHYAPQPCGIVPTLQVCGPVYCFTPSPVAVGTTDRFGAPTYRWGANETDVLLLNNAGPPQGNWFGCTWMNGTGFTKTCGGPPCNIGGVGNNTLTCPTDCFRKHPGATYTKCGSGPWLTPRCLVDYPYRLWHYPCTVNFTIFKVRMYVGGAEHRLDAACNWTRGERCDLEDRDRSELSPLLLSTTEWQVLPCSFTTLPALSTGLIHLHQNIVDIQYLYGIGSAVVSFAIKWEYIVLLFLLLADARVCACLWMMLLVAQAEAALENLVVLNAASVAGAHGILSFIVFFCAAWYIKGRLVPGAAYALYGVWPLLLLLLALPPRAYAMDREMAASCGGAVFVGLVLLTLSPHYKVFLARFIWWLQYLITRTEAHLQVWVPPLNVRGGRDAIILLTCVVHPELIFDITKYLLAIFGPLMVLQAGITRVPYFVRAQGLIRACMLARKVVGGHYVQMVFMKLAALAGTYVYDHLTPLRDWAHTGLRDLAVAVEPVVFSDMETKVITWGADTAACGDIILALPASARRGKEILLGPADSLEGQGWRLLAPITAYSQQTRGLLGCIITSLTGRDKNQVEGEVQVVSTATQSFLATCINGVCWTVFHGAGSKTLAGPKGPITQMYTNVDQDLVGWPAPPGARSLTPCTCGSSDLYLVTRHADVIPVRRRGDGRGSLLPPRPVSYLKGSSGGPLLCPSGHAVGILPAAVCTRGVAMAVEFIPVESMETTMRSPVFTDNPSPPAVPQTFQVAHLHAPTGSGKSTRVPAAYAAQGYKVLVLNPSVAATLGFGAYMSKAHGIDPNLRTGVRTITTGAPITYSTYGKFLADGGGSGGAYDIIMCDECHSTDSTTIYGIGTVLDQAETAGARLVVLSTATPPGSVTVPHLNIEEVALSNTGEIPFYGKAIPIEAIKGGRHLIFCHSKKKCDELAAKLSGLGLNAVAYYRGLDVSVIPTSGDVVVVATDALMTGFTGDFDSVIDCNTCVTQTVDFSLDPTFTIETTTVPQDAVSRSQRRGRTGRGRAGIYRFVTPGERPSGMFDSSVLCECYDAGCAWYELTPAETSVRLRAYLNTPGLPVCQDHLEFSEGVFTGLTHIDAHFLSQTKQAGENFPYLVAYQATVCARAQAPPPSWDEMWRCLIRLKPTLHGPTPLLYRLGAVQNEVTLTHPITKFIMTCMSADLEVVTSTWVLVGGVLAALAAYCLTTGSVVIVGRIILSGKPAIIPDREVLYQEFDEMEECASHLPYFEQGMQLAEQFKQKALGLLQTATKQAEAAAPVVESKWRALETFWAKHMWNFISGIQYLAGLSTLPGNPAIRSPMAFTASITSPLTTQHTLLFNILGGWVAAQLAPPSAASAFVGAGIAGAAVGTIGLGKVLVDILAGYGAGVAGALVAFKIMSGEMPSAEDMVNLLPAILSPGALVVGIVCAAILRRHVGPGEGAVQWMNRLIAFASRGNHVSPRHYVPESEPAARVTQILSSLTITQLLKRLHQWINEDCSTPCSSSWLREIWDWICTVLTDFKTWLQSKLLPRLPGVPFFSCQRGYKGVWRGDGIMHTTCPCGAQITGHVKNGSMRIVGPKTCSNTWYGTFPINAYTTGPCTPSPAPNYSKALWRVAAEEYVEVTRVGDFHYVTGMTTDNVKCPCQVPAPEFFTEVDGVRLHRYAPACRPLLREEVVFQVGLHQYLVGSQLPCEPEPDVAVLTSMLTDPSHITAETAKRRLARGSPPSLASSSASQLSAPSLKATCTTHHDSPDADLIEANLLWRQEMGGNITRVESENKVVILDSFDPLRAEDDEGEISVPAEILRKSRKFPPALPIWAPPDYNPPLLESWKDPDYVPPVVHGCPLPPTKAPPIPPPRRKRTVVLTESTVSSALAELATKTFGSSGSSAIDSGTATAPPDQASGDGDRESDVESFSSMPPLEGEPGDPDLSDGSWSTVSEEASEDVVCCSMSYTWTGALITPCAAEESKLPINPLSNSLLRHHNMVYATTSRSAGLRQKKVTFDRLQVLDDHYRDVLKEMKAKASTVKAKLLSVEEACKLTPPHSAKSKFGYGAKDVRSLSSRAVTHIRSVWKDLLEDTETPISTTIMAKNEVFCVQPEKGGRKPARLIVFPDLGVRVCEKMALYDVVSTLPQAVMGSSYGFQYSPKQRVEFLVNTWKSKKCPMGFSYDTRCFDSTVTENDIRVEESIYQCCDLAPEAKLAIKSLTERLYIGGPLTNSKGQNCGYRRCRASGVLTTSCGNTLTCYLKATAACRAAKLRDCTMLVNGDDLVVICESAGTQEDAASLRVFTEAMTRYSAPPGDPPQPEYDLELITSCSSNVSVAHDASGKRVYYLTRDPTTPLARAAWETARHTPVNSWLGNIIMYAPTLWARMILMTHFFSILLAQEQLEKTLDCQIYGACYSIEPLDLPQIIERLHGLSAFSLHSYSPGEINRVASCLRKLGVPPLRAWRHRARSVRAKLLSQGGRAATCGKYLFNWAVRTKLKLTPIPAASRLDLSGWFVAGYSGGDIYHSLSRARPRWFMLCLLLLSVGVGIYLLPNR

SEQ ID NO: 1746 - protein, 3010 aa, Artificial
  HCV
MSTNPKPQRKIKRNTNRRPQDVKFPGGGQIVGGVYLLPRRGPRLGVRATRKTSERPQPRGRRQPIPKARQPEGRAWAQPGYPWPLYGNEGLGWAGWLLSPRGSRPSWGPTDPRRRSRNLGKVIDTLTCGFADLMGYIPLVGAPLGGAARALAHGVRVLEDGVNYATGNLPGCSFSIFLLALLSCLTIPASAYQVRNASGVYHVTNDCSNSSIVYEAADVIMHTPGCVPCVRENNSSRCWVALTPTLAARNSSIPTTTIRRHVDLLVGAAALCSAMYVGDFCGSVFLVSQLFTFSPRRYETVQDCNCSIYPGHVSGHRMAWDMIMNWSPTTALVVSQLLRIPQAVVDMVAGAHWGVLAGLAYYSMVGNWAKVLVVMLLFAGVDGGTHVTGGKVAYTTQGFTSFFSRGPSQKIQLVNTNGSWHINRTALNCNDSLNTGFLAALFYTHSFNASGCPERMAGCRPIDEFAQGWGPITHVVPNISDQRPYCWHYAPRPCGIVPASQVCGPVYCFTPSPVVVGTTDRFGAPTYNWGNNETDVLLLNNTRPPQGNWFGCTWMNGTGFTKTCGGPPCNIGGVGNNTLTCPTDCFRKHPEATYTKCGSGPWLTPRCLVHYPYRLWHYPCTVNFTIFKVRMYVGGVEHRLEAACNWTRGERCDLEDRDRSELSPLLLSTTEWQVLPCSFTTLPALSTGLIHLHQNIVDVQYLYGIGSAVVSFAIKWEYILLLFLPLADARVCAWLWMMLLIAQAEAALENLVVLNAASMAGAHGILSFLVFFCAAWYIKGRLVPGAAYAFYGVWPLLLLLMALPARAYAMDREMAASCGGAVFVGLVLLTLSPYYKVFLAKLIWWLQYLITRAEAHLQVWIPPLNVRGGRDAIILLTCAVHPELIFDITKLLLAILGPLMVLQAGITRVPYFVRAQGLIRACMLVWKAAGGHYVQMAFVKLAALTGTYIYDHLTPLRDWAHAGLRDLAVAVEPVVFSDMETKIITWGADTAACGDIILGLPVSARRGKEILLGPADSLEGQGWRLLAPITAYSQQTRGLLGCIITSLTGRDKNQVEGEVQVVSTATQSFLATCINGVCWTVYHGAGSKTLAGPKGPITQMYTNVDQDLVGWPAPPGARSMTPCTCGSSDLYLVTRHADVIPVRRRGDSRGSLLSPRPISYLKGSSGGPLLCPSGHVVGIFRAAVCTRGVAKAVDFVPVESMETTMRSPVFTDNSTPPAVPQSFQVAHLHAPTGSGKSTKVPAAYAAQGYKVLVLNPSVAATLGFGAYMSKAHGVDPNIRTGVRTITTGAPITYSTYGKFLADGGCSGGAYDIIICDECHSTDSTSILGIGTVLDQAETAGARLVVLATATPPGSVTVPHPNIEEVALSNTGEIPFYGKAIPLEAIKGGRHLIFCHSKKKCDELAAKLSALGVNAVAYYRGLDVSIIPTSGDVVVVATDALMTGYTGDFDSVIDCNTCVTQTVDFSLDPTFTIETTTVPQDAVSRSQRRGRTGRGRGGIYRFVTPGERPSGMFDSSVLCECYDAGCAWYELTPAETSVRLRAYLNTPGLPVCQDHLEFWESVFTGLTHIDAHFLSQTKQAGDNFPYLVAYQATVCARAKAPPPSWDQMWKCLIRLKPTLHGPTPLLYRLGAVQNEVTLTHPITKFIMACMSADLEVVTSTWVLVGGVLAALAAYCLTTGSVVIVGRIILSGRPAVIPDREVLYQEFDEMEECASHLPYIEQGMQLAEQFKQKALGLLQTATKQAEAAAPVVESKWRALETFWAKHMWNFISGIQYLAGLSTLPGNPAIASLMAFTASITSPLTTQYTLLFNILGGWVAAQLAPPSAASAFVGAGIAGAAVGSIGLGKVLVDILAGYGAGVAGALVAFKVMSGDMPSTEDLVNLLPAILSPGALVVGVVCAAILRRHVGPGEGAVQWMNRLIAFASRGNHVSPTHYVPESDAAARVTQILSNLTITQLLKRLHQWINEDCSTPCSGSWLRDVWDWICTVLADFKTWLQSKLLPRLPGVPFFSCQRGYKGVWRGDGIMYTTCPCGAQITGHVKNGSMRIVGPRTCSNTWHGTFPINAYTTGPCTPSPAPNYSRALWRVAAEEYVEVTRVGDFHYVTGMTTDNVKCPCQVPAPEFFTELDGVRLHRYAPACKPLLRDEVTFQVGLNQYTVGSQLPCEPEPDVTVVTSMLTDPSHITAEAARRRLARGSPPSLASSSASQLSALSLKATCTTHHGAPDTDLIEANLLWRQEMGGNITRVESENKIVILDSFEPLRAEEDEREVSVAAEILRKTRKFPAAMPVWARPDYNPPLLESWKNPDYVPPVVHGCPLPPTKAPPIPPPRRKRTVVLTESTVSSALAELATKTFGSSGSSAVDSGTATGPPDQASAEGDAGSDAESYSSMPPLEGEPGDPDLNDGSWSTVSEEASEDVVCCSMSYTWTGALITPCAAEESKLPINALSNPLLRHHNMVYATTSRSASQRQKKVTFDRLQVLDDHYRDVLKDMKAKASTVKAKLLSVEEACKLTPPHSARSKFGYGAKDVRSLSSKAVNHIRSVWKDLLEDTETPIDTTIMAKNEVFCVQPEKGGRKPARLIVFPDLGVRVCEKMALYDVVSTLPQAVMGSSYGFQYSPGQRVEFLVNAWKSKKSPMGFAYDTRCFDSTVTENDIRTEESIYQCCDLDPEARQAIRSLTERLYIGGPLTNSKGQNCGYRRCRVSGVLTTSCGNTLTCYLKASAACRAAKLQDCTMLVCGDDLVVICDSAGTQEDAASLRVFTEAMTRYSAPPGDPPQPEYDLELITSCSSNVSVAHDASGKRVYYLTRDPTTPLARAAWETARHTPVNSWLGNIIMYAPTLWARMILMTHFFSILLAQEQLEKALDCQIYGATYSIEPLDLPQIIQRLHGLSAFSLHSYSPGEINRVASCLRKLGVPPLRVWRHRARSVRAKLLSQGGRAATCGKYLFNWAVKTKLKLTPIPEASQLDLSGWFVAGYSGGDIYHSLSRARPRWFMWCLLLLSVGVGIYLLPNR

SEQ ID NO: 1747 - protein, 3033 aa, Artificial
  HCV
  misc_feature (2816)..(2816): Xaa can be any naturally occurring amino acid
  misc_feature (2892)..(2892): Xaa can be any naturally occurring amino acid
MSTNPKPQRKTKRNTSRRPQDVKFPGGGQIVGGVYLLPRRGPRLGVRATRKTSERSQPRGRRQPIPKDRRSTGKSWGKPGYPWPLYGNEGLGWAGWLLSPRGSRPSWGPTDPRHRSRNVGKVIDTLTCGFADLMGYIPVVGAPLGGVARALAHGVRVLEDGVNYATGNLPGCSFSIFLLALLSCITVPVSAVQVKNISDSYMVTNDCSNDSITWQLQAAVLHVPGCVPCEKMGNISRCWIPVSPNVAVQRPGALTQGLRAHIDMVVMSATLCSALYVGDLCGGVMLAAQMFIVSPQHHHFVQECNCSIYPGAITGHRMAWDMMMNWSPTATMILAYAMRVPEVIIDIISGAHWGVMFGLAYFSMQGAWAKVVVILLLTAGVDAHTRSIAGSVAHATSGLAGLFTSGAKQNIQLINTNGSWHINRTALNCNDSLNTGFIASLFYTYRFNSSGCPERLSACRGIQAFRIGWGTLRYEDNVTNPEDMRPYCWHYPPKQCGIVSARSVCGPVYCFTPSPVVVGTTDRLGVPTYTWGENETDVFILNSTRPPGGSWFGCTWMNSTGFTKTCGAPPCRIRADFNASMDLLCPTDCFRKHPDATYIKCGSGPWLTPRCLVDYPYRLWHYPCTINYTIFKIRMYVGGVEHRLTAACNFTRGDPCNLEDRDRSQLSPLLHSTTEWAILPCSYSDLPALSTGLLHLHQNIVDVQYMYGLSPALTKYIVRWEWVVLLFLLLADARVCACLWMLILLGQAEAALEKLVVLHAASAASCNGFLYFVIFFVAAWYIKGRAVPLAAYSLTGLWPFCLLLLALPQQAYAYDASVHGQTGVALLILITLFTLTPGYKILLSRSLWWLCYLLTLGEAMIQEWVPPMQARGGRDGIIWAATMFCPGVVFDITKWLLAMLGPAYLLRDALTRVPYFVRAHALLRLCTMVRHLAGGRYVQMALLALGRWTGTYIYDHLSPMSDWAASGLRDLAVAVEPIIFSPMEKKVIVWGAETAACGDVLHGLPVSARLGREILLGPADGYTSKGWRLLAPITAYAQQTRGLLGAIVVSMTGRDKTEQAGEIQVLSTVTQSFLGTSISGVLWTVYHGAGNKTLAGSRGPVTQMYSSAEGDLVGWPSPPGTKSLEPCTCGAVDLYLVTRNADVIPARRRGDKRGALLSPRPLSTLKGSSGGPVLCPRGHAVGIFRAAVCSRGVAKSIDFIPVEALDVVTRSPTFSDNSTPPAVPQTYQVGYLHAPTGSGKSTKVPVAYAAQGYKVLVLNPSVAATLGFGAYLSKAHGINPNIRTGVRTVTTGESITYSTYGKFLADGGCAGGAYDIIICDECHAVDATTILGVGTVLDQAETAGVRLTVLATATPPGSVTTPHPNIEEVALGQEGEIPFYGRAIPLSYIKGGRHLIFCHSKKKCDELSAALRSMGLNAVAYYRGLDVSVIPTQGDVVVVATDALMTGYTGDFDSVIDCNVAVTQVVDFSLDPTFTITTQTVPQDAVSRSQRRGRTGRGRLGIYRYVSTGERASGMFDSVVLCECYDAGAAWYELTPSETTVRLRAYFNTPGLPVCQDHLEFWEAVFTGLTHIDAHFLSQTKQSGENFAYLVAYQATVCARAKAPPPSWDVMWKCLTRLKPTLVGPTPLLYRLGPVTNEVTLTHPVTKYIATCMQADLEVMTSTWVLAGGVLAAVAAYCLATGCVSIIGRLHVNQRAVVAPDKEVLYEAFDEMEECASRAALIEEGQRIAEMLKSKIQGLLQQASKQAQDIQPAVQASWPKVEQFWAKHMWNFISGIQYLAGLSTLPGNPAVASMMAFSAALTSPLSTSTTILLNILGGWLASQIAPPAGATGFVVSGLVGAAVGSIGLGKVLVDILAGYGAGISGALVAFKIMSGEKPSMEDVINLLPGILSPGALVVGVICAAILRRHVGPGEGAVQWMNRLIAFASRGNHVAPTHYVTESDASQRVTQLLGSLTITSLLRRLHNWITEDCPIPCAGSWLREVWDWVCTILTDFKNWLTSKLFPKMPGLPFISCQKGYRGVWAGTGIMTTRCPCGANISGNVRLGSMRITGPKTCMNTWQGTFPINCYTEGQCVPKPAPNFKTAIWRVAASEYAEVTQHGSYSYITGLTTDSLKVPCQLPSPEFFSWVDGVQIHRFAPTPKPFFRDEVSFCVGLNSFVVGSQLPCDPEPDADVLTSMLTDPSHITAEAAARRLARGSPPSEASSSASQLSAPSLRATCTTHGKAYDVDMVDANLFMGGDVTRIESESKVVVLDSLDPMAEERSDLEPSIPSEYMLPRNRFPPALPAWARPDYNPPLVESWKRPDYQPPTVAGCALPPPKKTPTPPPRRRRTVGLNENTIGDALQQLAIKAFGQPPLSGDSGLSTGADAADSGSRTPPDESALSETGSISSMPPLEGEPGDPDLEPEQVELQPPPQGEEVVPGSDSGSWSTCSEEDDSVVCCSMSYSWTGALITPCSPEEEKLPINPLSNSLLRYHNKVYCTTSKSASLRAKKVTFDRMQVLDAHYDSVLKDIKLAASKVSARLLTLEEACQLTPPHSARSKYGFGAKEVRSLSGRAVNHIKSVWKDLLEDSQTPIPTTIMAKNEVFCVDPAKGGKKAARLIVYPDLGVRVCEKMALYDVTQKLPQAVMGASYGFQYSPAQRVEFLLKAWAEKKDPMGFSYDTRCFDSTVTERDIRTEESIYRACSLPEEAHTAIHSLTERLYVGGPMLNSKGQTCGYRRCRASGVLTTSMGNTITCYIKALAACKAAGIVAPTMLVCGDDLVVISESQGTEEDERNLRAFTEAMTRYSAPPGDPPRPEYDLELITSCSSNVSVAXGPQGRRRYYLTRDPTTPLSRAAWETVRHSPVNSWLGNIIQYAPTIWVRMVLMTHFFSILMAQDTLDQNLNFEMYGXVYSVSPLDLPAIIERLHGLDAFSLHTYSPHELTRVASALRKLGAPPLRAWKSRARAVRASLISRGGRAAICGRYLFNWAVKTKLKLTPLPEARLLDLSSWFTVGAGGGDIYHSVSRARPRLLLLSLLLLLVGVGLFLLPAR

SEQ ID NO: 1748 - protein, 3021 aa, Artificial
  HCV
MSTLPKPQRKTKRNTIRRPQDVKFPGGGQIVGGVYVLPRRGPRLGVRATRKTSERSQPRGRRQPIPKARRSEGRSWAQPGYPWPLYGNEGCGWAGWLLSPRGSRPSWGPNDPRRRSRNLGKVIDTLTCGFADLMGYIPLVGAPVGGVARALAHGVRALEDGINFATGNLPGCSFSIFLLALFSCLIHPAASLEWRNTSGLYVLTNDCSNSSIVYEADDVILHTPGCVPCVQDGNTSTCWTPVTPTVAVRYVGATTASIRSHVDLLVGAATMCSALYVGDMCGAVFLVGQAFTFRPRRHQTVQTCNCSLYPGHLSGHRMAWDMMMNWSPAVGMVVAHVLRLPQTLFDIMAGAHWGILAGLAYYSMQGNWAKVAIIMVMFSGVDAHTYTTGGTASRHTQAFAGLFDIGPQQKLQLVNTNGSWHINSTALNCNESINTGFIAGLFYYHKFNSTGCPQRLSSCKPITFFRQGWGPLTDANITGPSDDRPYCWHYAPRPCDIVPASSVCGPVYCFTPSPVVVGTTDARGVPTYTWGENEKDVFLLKSQRPPSGRWFGCSWMNSTGFLKTCGAPPCNIYGGEGNPHNESDLFCPTDCFRKHPETTYSRCGAGPWLTPRCMVDYPYRLWHYPCTVDFRLFKVRMFVGGFEHRFTAACNWTRGERCDIEDRDRSEQHPLLHSTTELAILPCSFTPMPALSTGLIHLHQNIVDVQYLYGVGSGMVGWALKWEFVILVFLLLADARVCVALWLMLMISQTEAALENLVTLNAVAAAGTHGIGWYLVAFCAAWYVRGKLVPLVTYSLTGLWSLALLVLLLPQRAYAWSGEDSATLGAGVLVLFGFFTLSPWYKHWIGRLMWWNQYTICRCESALHVWVPPLLARGSRDGVILLTSLLYPSLIFDITKLLMAVLGPLYLIQATITTTPYFVRAHVLVRLCMLVRSVIGGKYFQMIILSIGRWFNTYLYDHLAPMQHWAAAGLKDLAVATEPVIFSPMEIKVITWGADTAACGDILCGLPVSARLGREVLLGPADDYREMGWRLLAPITAYAQQTRGLLGTIVTSLTGRDKNVVTGEVQVLSTATQTFLGTTVGGVIWTVYHGAGSRTLAGAKHPALQMYTNVDQDLVGWPAPPGAKSLEPCACGSSDLYLVTRDADVIPARRRGDSTASLLSPRPLACLKGSSGGPVMCPSGHVAGIFRAAVCTRGVAKSLQFIPVETLSTQARSPSFSDNSTPPAVPQSYQVGYLHAPTGSGKSTKVPAAYVAQGYNVLVLNPSVAATLGFGSFMSRAYGIDPNIRTGNRTVTTGAKLTYSTYGKFLADGGCSGGAYDVIICDECHAQDATSILGIGTVLDQAETAGVRLTVLATATPPGSITVPHSNIEEVALGSEGEIPFYGKAIPIALLKGGRHLIFCHSKKKCDEIASKLRGMGLNAVAYYRGLDVSVIPTTGDVVVCATDALMTGFTGDFDSVIDCNVAVEQYVDFSLDPTFSIETRTAPQDAVSRSQRRGRTGRGRLGTYRYVASGERPSGMFDSVVLCECYDAGCSWYDLQPAETTVRLRAYLSTPGLPVCQDHLDFWESVFTGLTHIDAHFLSQTKQQGLNFSYLTAYQATVCARAQAPPPSWDEMWKCLVRLKPTLHGPTPLLYRLGPVQNETCLTHPITKYLMACMSADLEVTTSTWVLLGGVLAALAAYCLSVGCVVIVGHIELEGKPALVPDKEVLYQQYDEMEECSQAAPYIEQAQVIAHQFKEKILGLLQRATQQQAVIEPIVTTNWQKLEAFWHKHMWNFVSGIQYLAGLSTLPGNPAVASLMAFTASVTSPLTTNQTMFFNILGGWVATHLAGPQSSSAFVVSGLAGAAIGGIGLGRVLLDILAGYGAGVSGALVAFKIMGGECPTAEDMVNLLPAILSPGALVVGVICAAILRRHVGPGEGAVQWMNRLIAFASRGNHVSPTHYVPESDAAARVTALLSSLTVTSLLRRLHQWINEDYPSPCSDDWLRTIWDWVCSVLADFKAWLSAKIMPALPGLPFISCQKGYKGVWRGDGVMSTRCPCGAAITGHVKNGSMRLAGPRTCANMWHGTFPINEYTTGPSTPCPSPNYTRALWRVAANSYVEVRRVGDFHYITGATEDELKCPCQVPAAEFFTEVDGVRLHRYAPPCKPLLRDDITFMVGLHSYTIGSQLPCEPEPDVSVLTSMLRDPSHITAETAARRLARGSPPSEASSSASQLSAPSLKATCQTHRPHPDAELVDANLLWRQEMGSNITRVESETKVVVLDSFEPLRAETDDVEPSVAAECFKKPPKYPPALPIWARPDYNPPLLDRWKAPDYVPPTVHGCALPPRGAPPVPPPRRKRTIQLDGSNVSAALAALAEKSFPSSKPQEENSSSSGVDTQSSTTSKVPPSPGGESDSESCSSMPPLEGEPGDPDLSCDSWSTVSDSEEQSVVCCSMSYSWTGALITPCSAEEEKLPISPLSNSLLRHHNLVYSTSSRSASQRQKKVTFDRLQVLDDHYKTALKEVKERASRVKARMLTIEEACALVPPHSARSKFGYSAKDVRSLSSRAINQIRSVWEDLLEDTTTPIPTTIMAKNEVFCVDPAKGGRKPARLIVYPDLGVRVCEKRALYDVIQKLSIETMGPAYGFQYSPQQRVERLLKMWTSKKTPLGFSYDTRCFDSTVTEQDIRVEEEIYQCCNLEPEARKVISSLTERLYCGGPMFNSKGAQCGYRRCRASGVLPTSFGNTITCYIKATAAAKAANLRNPDFLVCGDDLVVVAESDGVDEDRAALRAFTEAMTRYSAPPGDAPQATYDLELITSCSSNVSVARDDKGRRYYYLTRDATTPLARAAWETARHTPVNSWLGNIIMYAPTIWVRMVMMTHFFSILQSQEILDRPLDFEMYGATYSVTPLDLPAIIERLHGLSAFTLHSYSPVELNRVAGTLRKLGCPPLRAWRHRARAVRAKLIAQGGKAKICGLYLFNWAVRTKTNLTPLPAAGQLDLSSWFTVGVGGNDIYHSVSRARTRHLLLCLLLLTVGVGIFLLPAR

SEQ ID NO: 1749 - protein, 3014 aa, Artificial
  HCV
MSTNPKPQRKTKRNTNRRPQDVKFPGGGQIVGGVYLLPRRGPRLGVRATRKTSERSQPRGRRQPIPKARQPTGRSWGQPGYPWPLYANEGLGWAGWLLSPRGSRPNWGPNDPRRKSRNLGKVIDTLTCGFADLMGYIPLVGGPVGGVARALAHGVRVLEDGVNYATGNLPGCSFSIFILALLSCLTVPTSAVPYRNASGVYHVTNDCPNSSIVYEAEDLILHAPGCVPCVRQGNVSRCWVQITPTLSAPSLGAVTAPLRRAVDYLAGGAALCSALYVGDACGAVFLVGQMFTYSPRRHNVVQDCNCSIYSGHITGHRMAWDMMMNWSPTTALVMAQLLRIPQVVIDIIAGAHWGVLFAAAYYASAANWAKVVLVLFLFAGVDANTRTVGGSAAQGARGLASLFTPGPQQNLQLINTNGSWHINRTALNCNDSLQTGFVAGLLYYHKFNSTGCPQRMASCRPLAAFDQGWGTISYAAVSGPSDDKPYCWHYPPRPCGIVPARGVCGPVYCFTPSPVVVGTTDRKGNPTYSWGENETDIFLLNNTRPPTGNWFGCTWMNSTGFVKTCGAPPCNLGPTGNNSLKCPTDCFRKHPDATYTKCGSGPWLTPRCLVHYPYRLWHYPCTLNYTIFKVRMYIGGLEHRLEVACNWTRGERCDLEDRDRAELSPLLHTTTQWAILPCSFTPTPALSTGLIHLHQNIVDTQYLYGLSSSIVSWAVKWEYIVLAFLLLADARICTCLWIMLLVCQAEAALENVIVLNAAAAAGTHGFFWGLLVICFAWHFKGRLVPGATYLCLGIWPLLLLLFLLPQRALALDSSDGGTVGCLVLTILTIFTLTPGYKKMVVLVIWWLQYFIARVEAFIHVWVPPLQVRGGRDAIIMLTCLFHPALGFEVTKILLGILGPLYLLQYSLIKLPYFIRARALLRACLLAKHLACGRYVQAALLHLGRLTGTYIYDHLAPMKDWAASGLRDLAVATEPIIFSPMETKVITWGADTAACGDILAGLPVSARRGHEIFLGPADDIREAGWRLLAPITAYAQQTRGVLGAIIVSLTGRDKNEAEGEVQVLSTATQTFLGTCINGVMWTVFHGAGAKTLAGPKGPVVQMYTNVDKDLVGWPTPPGTRSLTPCTCGSADLYLVTRHADVVPARRRGDTRASLLSPRPISYLKGSSGGPVMCPSGHVVGVFRAAVCTRGVAKALDFIPVENLETTMRSPVFTDNSTPPAVPHEFQVGHLHAPTGSGKSTKVPAAYAAQGYKVLVLNPSVAATLGFGAYMSRAYGVDPNIRTGVRTVTTGAAITYSTYGKFLADGGCSGGAYDVIICDECHSQDATTILGIGTVLDQAETAGARLVVLATATPPGSVTTPHPNIEEVALPSEGEIPFYGRAIPLALIKGGRHLIFCHSKKKCDELAKQLTSQGVNAVAYYRGLDVAVIPATGDVVVCSTDALMTGFTGDFDSVIDCNTTVTQTVDFSLDPTFTIETTTVPQDAVSRSQRRGRTGRGRHGIYRYVSSGERPSGIFDSVVLCECYDAGCAWYDLTPAETTVRLRAYLNTPGLPVCQDHLEFWEGVFTGLTNIDAHMLSQTKQGGENFPYLVAYQATVCVRAKAPPPSWDTMWKCMLRLKPTLTGPTPLLYRLGAVQNEITLTHPITKYIMACMSADLEVITSTWVLVGGVVAALAAYCLTVGSVAIVGRIILSGRPAIIPDREVLYQQFDEMEECSASLPYMDEARAIAEQFKEKVLGLIGTAGQKAETLKPAATSMWNRAEQFWAKHMWNFVSGIQYLAGLSTLPGNPAVATLMSFTAAVTSPLTTQQTLLFNILGGWVASQIAPPTAATAFVVSGMAGAAVGSIGLGRVLIDILAGYGAGVAGALVAFKIMCGEKPTAEDLVNLLPSILCPGALVVGVICAAVLRRHIGPGEGAVQWMNRLIAFASRGNHVSPTHYVPETDASAKVTQLLSSLTVTSLLKRLHTWIGEDYSTPCDGTWLRAIWDWVCTALTDFKAWLQAKLLPQLPGVPFLSCQRGYRGVWRGDGVNSTKCPCGATISGHVKNGTMRIVGPKLCSNTWHGTFPINATTTGPSVPAPAPNYKFALWRVGAADYAEVRRVGDYHYITGVTQDNLKCPCQVPSPEFFTELDGVRIHRYAPPCNPLLREEVCFSVGLHSFVVGSQLPCEPEPDVTVLTSMLSDPAHITAETAKRRLDRGSPPSLASSSASQLSAPSLKATCTTQGHHPDADLIEANLLWRQCMGGNITRVEAENKVVILDSFEPLKADDDDREISVSADCFRRGPAFPPALPIWARPGYDPPLLETWKQPDYDPPQVSGCPLPPAGLPPVPPPRRKRKPVVLSDSNVSQVLADLAHARFKADTQSIEGQDSAVGTSSQPDSGPEEKRDDDSDAASYSSMPPLEGEPGDPDLSSGSWSTVSDEDSVVCCSMSYSWTGALITPCSAEEEKLPINPLSNTLLRHHNLVYSTSSRSAGQRQKKVTFDRLQVLDDHYREVVDEMKRLASKVKARLLPLEEACGLTPPHSARSKYGYGAKEVRSLDKKALNHIKGVWQDLLDDSDTPLPTTIMAKNEVFAVEPSKGGKKPARLIVYPDLGVRVCEKRALYDIAQKLPTALMGPSYGFQYSPAQRVEFLLKTWRSKKTPMAFSYDTRCFDSTVTEHDIMTEESIYQSCDLQPEARAAIRSLTQRLYCGGPMYNSKGQQCGYRRCRASGVFTTSMGNTMTCYIKALASCRAAKLRDCTLLVCGDDLVAICESQGTHEDEASLRAFTEAMTRYSAPPGDPPVPAYDLELVTSCSSNVSVAHDASGNRVYYLTRDPQVPLARAAWETAKHSPVNSWLGNIIMYAPTLWARIVLMTHFFSVLQSQEQLEKALAFEMYGSVYSVTPLDLPAIIQRLHGLSAFTLHSYSPSEINRVSSCLRKLGVPPLRAWRHRARAVRAKLIAQGGKAAICGIYLFNWAVKTKRKLTPLADADRLDLSSWFTVGAGGGDIYHSMSRARPRCILLCLLLLTVGVGIFLLPAR

SEQ ID NO: 1750 - protein, 3019 aa, Artificial
  HCV
MSTLPKPQRKTKRNTNRRPMDVKFPGGGQIVGGVYLLPRRGPRLGVRATRKTSERSQPRGRRQPIPKARPSQGRTWGQPGYPWPLYGNEGCGWAGWLMSPRGSRPSWGPNDPRRRSRNLGKVIDTLTCGLADLMGYIPVVGGPLGGVAAALAHGVRAIEDGINYATGNLPGCSFSIFILALLSCLTTPASALTYGNSSGLYHLTNDCPRSSIVLEAEAMILHLAGCVPCVRAGNISRCWHPVSPTLAVPNASVPASGFRKHVDLLAGAAVVCSSMYIGDLCGAVFLAGQLATFSPRIHDITQDCNCSVYTGHVTGHRMAWDMMMNWSPTTTLVLSSILRVPEIVLEVFAGGHWGVLIAIAYFGMSGNWLKVIAVLFLFAGVEATTTVGRAAGRSAYLFTSIFSSGPNQKIQLINTNGSWHINRTALNCIDSLQTGFLSALFYRSNFNSTGCSERLGACKPLEHFQQGWGPITHKSNITGPSEDRPYCWHYAPRECSVVPASSVCGPVYCFTPSPVVVGTTDRLGNPTYNWGENETDVFMLESLRPPQGGWFGCTWMNSTGFTKTCGAPPCQLIPGDYNSSSNQLLCPTDCFRKHPEATYQKCGSGPWLTPRCLVDYPYRLWHYPCTVNYTIHKVRMFIGGVEHRFDAACNWTRGDRCDLYDRDRIEMSPLLFSTTQLAILPCSFTTMPALSTGLIHLHQNIVDVQYLYGVSSSIVSWAVKWEYVVLMFLVLADARICTCLWLMLLVGKVEAALERLVVLNAASAAGTAGWCWTLIFLCCVWHVKGRLVPACTYTALGMWPILLVILALPQRAYAWDNSQAASLGVVALLVLTIFTLSPMYKQLLTHAIWWNQYMLARAEAMIHDWVPDLRVRGGRDAIILLTCLLHPHLGFEVTKILLAILAPLYILQHSLLKVPYFVRAHILLRACMFFRKVAAGKYVQACLLRLGAWTGTYIYDHLAPLSEWASDGLRDLAVAVEPVIFSPMEKKIITWGADTAACGDILRGLPVSARLGDLVLLGPADDMRHGGWKLLAPITAYAQQTRGLVGTIVTSLTGRDKNEAEGEVQVVSTATQSFLATTINGVLWTVYHGAGSKNLAGPKGPVCQMYTNVDQDLVGWPAPLGARSLAPCTCGSSDLYLVTRGADVIPARRRGDTRAALLSPRPISTLKGSSGGPLMCPSGHVVGLFRAAVCTRGVAKALDFIPVENMDTTMRSPVFTDNSSPPAVPQTYQVGYLHAPTGSGKSTRVPAAYATQGYKVLVLNPSVAATLSFGAYMSKAHGIDPNIRTGVRTITTGGPVTYSTYGKFLADGGCSGGAYDIIICDECHSTDPTTVLGIGTVLDQAETAGVRLTVLATATPPGSVTVPHPNITETALPTTGEIPFYGKCIPLEFIKGGRHLIFCHSKKKCDELSKQLTSLGLNAVAFYRGVDVAVIPTSGDVVVCATDALMTGYTGDFDSVIDCNVAVTQVVDFSLDPTFSIETTTVPQDAVSRSQRRGRTGRGKPGVYRFVSQGERPSGMFDSVVLCEAYDTGCAWYELTPAETTVRLRAYLNTPGLPVCQDHLEFWEGVFTGLTHIDAHFLSQTKQGGENFAYLVAYQATVCARAKAPPPSWDVMWKCLTRLKPTLTGPTPLLYRLGAVQNEIVTTHPITKYIMTCMSADLEVITSTWVIVGGVLAALAAYCLTVGCVVICGRIVTSGKPAVVPDREVLYQQFDEMEECSKHIPYLVEGQQIAEQFKQKVLGLLQAGTKHAEELKPAIHSTWPRVEEFWRKHMWNFVSGIQYLAGLSTLPGSPAVASLMSFTASLTSPLRTSQTLLLNILGGWIASQVAPPSASTAFVVSGLAGATVASIGLGRVIVDILAGYGAGVAGALVAFKIMSGECPSTEDMVNLLPALLSPGALVVGVVCAAILRRHVGPSEGANQWMNRLIAFASRGNHVSPTHYVPETDASNKVTQILSSLTITSLLRRLHQWIHEDTSTPCASSWLRDVWDWVCTVLSDFKTWLKAKITPRIPGIPFISCQAGYRGVWAGDGVCHTTCSCGAQIAGHVKNGSMKITGPRMCSNTWHGTFPINATTTSPSVPVPAPNYKRALWRVSAEEYVEVERHGDRHYVVGVTADGLKCPCQVPGPEFFTEVDGVRIHRYAPPCKPLLRDEVSFSVGLLEFVVGSQLPCEPEPDVTVVTSMLTDPSHITAETASRRLKRGSPPSLASSSASQLSAPSLKATCTANGDHPDAELIEANLLWRQEMGSNITRVESETKVVILDSFDPLVAEYDDREISVSAECHRPPRPKFPPALPIWARPDYNPPLLQKWQMPGYEPPVVSGCALPPAKPTPIPPPRRKRLIQLDESAVSQALQQLADKVFVEDTSTSEPSSGLGGSIAGPSSPDPTTADDTCSDAGSFSSMPPLEGEPGDPDLSTGSWSTVSEEDDVVCCSMSYTWTGALITPCAAEEEKLPINPLSNSLIRHHNMVYSTTSRSAGLRQKKVTFDRLQVVDQHYQDVLKEIKLRASTVHARLLSTEEACSLTPPHSARSRYGYGARDVRSHTSKAVKHIDSVWEDLLEDNATPIPTTIMAKNEVFCVDPSKGGRKPARLIVYPDLSVRVCEKMALYDVTQKLPKTVMGSAYGFQYSPSQRVEYLLKMWRSKKTPMGFSYDTRCFDSTVTERDIRTEEDIYQSCQLDPTARKAISSLTERLYCGGPMFNSKGESCGYRRCRASGVLTTSLGNTLTCYLKAQAACRAANIKNFDMLVCGDDLVVICESAGVQEDVVALRAFTDAMIRYSAPPGDAPQPTYDLELITSCSSNVSVAHDGTGQRYYYLTRDCTTPLARAAWETARHTPVNSWLGNIIMYAPTIWVRMVLMTHFFSILQCQEQLEAALNFDMYGVTYSVTPLDLPAIIQRLHGMAAFSLHGYSPTELNRVGASLRKLGAPPLRAWRHRARAVRAKLIAQGGKAAICGKYLFNWAVKTKLKLTPLAAASQLDLSGWFVAGYDGGDIYHSVSRARPRLLLLGLLLLTVGVGIFLLPAR

SEQ ID NO: 1751 - protein, 3021 aa, Artificial
  HCV
MSTLPKPQRKTKRNTIRRPQDVKFPGGGQIVGGVYVLPRRGPRLGVCATRKTSERSQPRRRRQPIPKARQSGGRSWAQPGYPWPLYGNEGCGWAGWLLSPRGSRPSWGPNDPRRRSRNLGKVIDTLTCGFADLMGYIPLVGAPVGGVARALAHGVRALEDGINFATGNLPGCSFSIFLLALFSCLIHPAASLEWRNTSGLYVLTNDCSNSSIVYEADDVILHTPGCVPCVQNDNISTCWTPVTPTVAVRYVGATTASIRSHVDLLVGAATMCSALYVGDMCGAVFLVGQAFTFRPRRHQTVQTCNCSLYPGHLSGHRMAWDMMMNWFPALGMAVAHVLRVPQTLFDIIAGAHWGILAGLAYYSMQGNWAKVAIIMVMFSGVDAVTYTTGGSAAHATRGLTSLFSVGAQQKLQLVNTNGSWHINSTALNCNESINTGFIAGLFYYHRFNSTGCPQRLSSCKPITFFKQGWGPLTDANISGPSDDKPYCWHYAPRPCKVVPASGVCGPVYCFTPSPVVVGTTDAKGVPTYTWGANDTDVFLLESLRPPGGRWFGCTWMNSTGFVKTCGASPCDIYGGGGNSGNESDLFCPTDCFRKHPEATYSRCGAGPWLTPRCMVDYPYRLWHYPCTVNFTLFKVRMFVGGFEHRFTAACNWTRGERCDIEDRDRSEQHPLLHSTTELAILPCSFTPMPALSTGLIHLHQNIVDVQYLYGVGSGMVGWALKWEFVILIFLLLADRRVCVALWLMLMITQAEAALENLVTLNAVAAAGTHGIGWYLVAFCAAWYVRGKLVPVVTYSLTGLWPLALLVLMLPQRAYAWSGEDSATLGAGVLALFGFFTLSPWYKHWIGRLIWWNQYTICRCESALQVWVPPLLARGSRDGVILLTSLLYPSLIFDITKLLIAVLGPLYLIQAAVTTTPYFVRAQVLVRLCMLVRSVMGGKYFQMIILSIGRWFNTYLYDHLAPMQHWAAAGLKDLAVATEPVIFSPMEIKVITWGADTAACGDILCGLPVSARLGREVLLGPADDYREMGWRLLAPITAYAQQTRGLLGTIVTSLTGRDKNVVTGEVQVLSTATQTFLGTTVGGVTWTVYHGAGSRTLAGAKHPALQMYTNVDQDLVGWPAPPGAKSLEPCACGSADLYLVTRDADVIPARRRGDSTASLLSPRPLACLKGSSGGPVMCPSGHVAGIFRAAVCTRGVAKALQFIPVETLSTQTRSPSFSDNSTPPAVPQSYQVGYLHAPTGSGKSTKVPAAYVAQGYTVLVLNPSVAATLGFGSFMSRAYGIDPNIRTGNRTVTTGAKLTYSTYGKFLADGGCSGGAYDVIICDECHAQDATSILGIGTVLDQAETAGVRLTVLATRTPPGSITVPHSNIEEVALGSEGEIPFYGKAIPIALLKGGRHLIFCHSKKKCDEIASKLRGMGLNAVAYYRGLDVSVIPTTGDVVVCATDALMTGYTGDFDSVIDCNVAVEQYVDFSLDPTFSIETRTAPQDAVSRSQRRGRTGRGRLGTYRYVAPGERPSGMFDSVVLCECYDAGCSWYDLQPAETTVRLRAYLSTPGLPVCQDHLDFWESVFTGLTHIDAHFLSQTKQQGLNFSYLTAYQATVCARAQAPPPSWDETWKCLVRLKPTLHGPTPLLYRLGPVQNEICLSHPITKYVMACMSADLEVTTSTWVLLGGVLAALAAYCLSVGCVVIVGHIELGGKPALVPDKEVLYQQYDEMEECSQAAPYIEQAQAIAHQFKEKVLGLLQRATQQQAVIEPIVATNWQKLEAFWHKHMWNFVSGIQYLAGLSTLPGNPAVASLMAFTASVTSPLTTNQTMFFNILGGWVATHLAGPQSSSAFVVSGLAGAAIGGIGLGRVLLDILAGYGAGVSGALVAFKIMGGELPTAEDMVNLLPAILSPGALVVGVICAAILRRHVGPGEGAVQWMNRLIAFASRGNHVSPTHYVPESDAAARVTALLSSLTVTSLLRRLHQWINEDYPSPCSDDWLRIIWDWVCSVLSDFKSWLSAKIMPALPGLPFISCQKGYKGVWRGDGVMSTRCPCGATITGHVKNGSMRLAGPRTCANMWHGTFPINEYTTGPSTPCPSPNYTRALWRVAANSYVEVRRVGDFHYITGATEDELKCPCQVPAAEFFTEVDGVRLHRYAPPCKPLLREEITFSVGLNSYTIGSQLPCEPEPDVSVLTSMLRDPSHITAETAARRLARGSPPSEASSSASQLSAPSLKATCQTHRPHPDAELVNANLLWRQEMGSNITRVESETKVVILDSFEPLRAETDDAELSVAAECFKKPPKYPPALPIWARPDYNPPLLDRWKAPDYVPPTVHGCALPPRGAPPVPPPRRKRTIQLDGSNVSAALRALAEKSFPSLKPQEENNSSSGVDTQSSTTSKVPPSPGGESDSESCSSMPPLEGEPGDPDLSCDSWSTVSDSEEQSVVCCSMSYSWTGALITPCSAEEEKLPISPLSNSLLRHHNLVYSTSSRSASQRQRKVTFDRLQVLDDHYKTVLKEVKERASRVKARMLTIEEACALVPPHSARSKFGYSAKDVRSLSSRAINQIRSVWEDLLEDTTTPIPTTIMAKNEVFCVDPAKGGRKPARLIVYPDLGVRVCEKRALYDVIQKLAIETIGSAYGFQYSPQQRVERLLKMWTSKKTPLGFSYDTRCFDSTVTEQDIRVEEEIYQCCNLEPEARKVISSLTERLYCGGPMFNSKGAQCGDRRCRASGVLPTSFGNTITCYIKATAAANGAGLRDPDFLVCGDDLVVVAESDGVDEDGAALRAFTEAMTRYSAPPGDAPQPTYDLELITSCSSNVSVARDDKGRRYYYLTRDATTPLARAAWETARHTPVNSWLGNIIMYAPTIWVRMVMMTHFFSILQSQEILDRPLDFEMYGATYSVTPLDLPAIIERLHGLSAFTLHSYSPVELNRVAGTLRKLGCPPLRAWRHRARAGRAKLIAQGGKAKICGLYLFNWAVRTKTKLTPLPRAGQLDLSIWFTVGVGGNDIYHSVSRARTRYLLLCLLLLTVGVGIFLLPAR

SEQ ID NO: 1752 - protein, 3021 aa, Artificial
  HCV
MSTLPKPQRKTKRNTIRRPQDVKFPGGGQIVGGVYVLPRRGPRLGVRATRKTSERSQPRGRRQPIPKARRSEGRSWAQPGYPWPLYGNEGCGWAGWLLSPRGSRPSWGQNDPRRRSRNLGKVIDTLTCGFADLMGYIPLVGAPVGGVARALAHGVRALEDGINFATGNLPGCSFSIFLLALFSCLIHPAASLEWRNTSGLYVLTNDCSNSSIVYEADDVILHTPGCVPCVQDGNTSTCWTPVTPTVAVRYVGATTASIRSHVDLLVGAATMCSALYVGDMCGAVFLVGQAFTFRPRRHQTVQTCNCSLYPGHLSGHRMAWDMMMNWSPAVGMVVSHVLRLPQTLFDIIAGAHWGILAGLAYYSMQGNWAKVAVIMVMFSGVDAETYITGGSAAHGVSTLTSLFSSGPQQKLQLVKTNGSWHINSTALNCNESINTGFIAGLFYYHKFNSTGCPQRLSSCKPITFFRQGWGSLTDANVTGASADKPYCWHYAPRPCDVVPALNVCGPVYCFTPSPVVVGTTDRKGVPTYNWGENESDVFLLESLRPPSGRWFGCAWMNSTGFLKTCGAPPCNIYGGGGNPNNESHLFCPTDCFRKHPDATYSRCGAGPWLTPRCMVDYPYRLWHYPCTVNFTLFKVRMFVGGFEHRFTAACNWTRGERCNIEDRDRSEQHPLLHSTTELAILPCSFTPMPALSTGLIHLHQNIVDVQYLYGVGSGMVGWALKWEFVILIFLLLADARVCVALWLMLMISQAEAALENLVTLKAVAAAGTHGIGWYLVAFCAAWHVRGKLVPLVTYSLTGLWSLALLVLLLPQRAYAWSGEDSATLGAGVLVLFGFFTLSPWYKHWIGRLIWWNQYTICRCESALQVWVPPLLARGSRDGVILLTSLLYPSLIFDITKLLIAVLGPLYLIQASITATPYFVRAHVLVRLCMLVRSMMGGKYFQMIILSVGRWFNTYLYDHLAPMQHWAAAGLKDLAVATEPVIFSPMEIKVITWGADTAACGDILCGLPVSARLGREVLLGPADDYREMGWRLLAPITAYAQQTRGLLGTIVTGLTGRDKNVVTGEVQVLSTATQTFLGTTVGGVMWTVYHGAGSRTLAGAKHPALQMYTNVDQDLVGWPAPPGAKSLEPCACGSADLYLVTRDADVIPARRRGDSTASLLSPRPLACLKGSSGGPVMCPSGHVAGIFRAAVCTRGVAKALQFIPVETLSTQARSPSFSDNSTPPAVPQTYQVGYLHAPTGSGKSTKVPAAYVAQGYNVLVLNPSVAATLGFGSFMSRAYGTDPNIRTGNRTVTTGAKLTYSTYGKFLADGGCSGGAYDVIICDECHAQDATSILGIGTVLDQAETAGVRLTVLATATPPGSITVPHSNIEEVALGSEGEIPFYGKAIPIALLKGGRHLIFCHSKKKCDEIASKLRGMGLNAVAYYRGLDVSVIPTTGDVVVCATDALMTGFTGDFDSVIDCNVAVEQYVDFSLDPTFSIETRTAPQDAVSRSQRRGRTGRGRLGTYRYVAPGERPSGMFDSVVLCECYDAGCSWYDLQPAETTVRLRAYLSTPGLPVCQDHLDFWESVFTGLTHIDAHFLSQTKQQGLNFSYLTAYQATVCARAQAPPPSWDEMWKCLVRLKPTLHGPTPLLYRLGPVQNETCLTHPVTKYIMACMSADLEVTTSTWVLLGGVLAALAAYCLSVGCVVIVGHIELGGKPALVPDKEVLYQQYDEMEECSQAAPYIEQAQAIAHQFKEKVLGLLQRATQQQAVIEPIVATNWQKLEAFWHKHMWNFVSGIQYLAGLPTLPGNPAVASLMAFTASVTSPLTTNQTMFFNILGGWVATHLAGPQSSSAFVVSGLAGAAIGGIGLGRVLLDILAGYGAGVSGALVAFKIMGGELPTTEDLVNLLPAILSPGALVVGVICAAILRRHVGPGEGAVQWMNRLIAFASRGNHVSPTHYVPESDAAAKVTALLSSLTVTSLLRRLHQWINEDYPSPCSDDWLRIIWDWVCSVLADFKTWLSAKIMPALPGLPFISCQKGYKGVWRGDGVTTTRCPCGATITGHVKNGSMRLAGPRTCANMWYGTFPINEYTTGPSTPCPSPNYTRALWRVAANSYVEVRRVGDFHYITGATEDELKCPCQVPAAEFFTEVDGVRLHRYAPPCKPLLRDDITFMVGLNSYAIGSQLPCEPEPDVSVLTSMLRDPSHITAETAARRLARGSPPSEASSSASQLSAPSLKATCQTHRPHPDAELVDANLLWRQEMGSNITRVESETKVVILDSFEPLRAQTDDAELSVAAECFKKPPKYPPALPIWARPDYNPPLLDRWKTPDYVPPTVHGCALPPRGAPPVPPPRRKRTIQLDGSNVSAALAALAKKSFPSVNPQDENSSSSGVDTQSSTTSKVPPSPGGESDSESCSSMPPLEGEPGDPDLSCDSWSTVSDSEEQSVVCCSMSYSWTGALITPCSAEEEKLPISPLSNSLLRHHNLVYSTSSRSASQRQKKVTFDRLQVLDDHYKTALKEVKERASRVKARMLTIEEACALVPPHSARSKFGYSAKDVRSLSSRAIDQIRSVWEDLLEDTTTPIPTTIMAKNEVFCVDPARGGRKRARLIVYPDLGVRVCEKRVLYDVIQKLSIETMGTAYGFQYSPQQRVERLLKMWTSKKTPLGFSYDTRCFDSTVTEQDFRVEEEIYQCCNLEPEARKVISSLTERLYCGGPMFNSKGAQCGYRRCRASGVLPTSFGNTITCYIKATAAAKAAGLRNPDFLVCGDDLVVVAESDGVDEDRTALRAFTEAMTRYSAPPGDAPQPTYDLELITSCSSNVSVALDNKGKRYYYLTRDATTPLARAAWETARHTPVNSWLGNIIMYAPTIWVRMVMMTHFFSILQSQEILDRPLDFEMYGATYSVTPLDLPAIIERLHGLSAFTLHSYSPVELNRVAGTLRKLGCPPLRAWRHRARAVRAKLIAQGGKAKICGLYLFNWAVRTKTNLTPLPATGQLDLSSWFTVGVGGNDIYHSVSRARTRYLLLCLLLLTVGVGIFLLPAR

SEQ ID NO: 1753 - protein, 3015 aa, Artificial
  HCV
MSTLPKPQRKTKRNTNRRPMDVKFPGGGQIVGGVYLLPRRGPRLGVRATRKTSERSQPRGRRQPIPKARQPIGRSWGQPGYPWPLYGNEGCGWAGWLLSPRGSRPNWGPNDPRRRSRNLGKVIDTLTCGLADLMGYIPVLGGPLGGVAAALAHGVRAIEDGVNYATGNLPGCSFSIFLLALLSCLTTPASAIQVRNASGIYHLTNDCSNNSIVFEAETIILHLPGCVPCIKVGNGSRCWLSVSPTLAVPNSSVPIHGFRRHVDLLVGAAAFCSAMYIGDLCGSVFLVGQLFTFRPKHHQVTQDCNCSIYAGHITGHRMAWDMMLNWSPTVSYVVSSALRVPQLLLEVITGAHWGVLGALLYFSMVANWAKVIAVLFLFAGADATTYTGSAVSSTTGAFVSLFSPGPTQNLQLVNSNGSWHINRTALNCNDSLQTGFIAGLFARYKFNSTGCPERMSKCRPLHSFEQGWGPISYVNISGSSEDKPYCWHYAPRPCGIVPARNVCGPVYCFTPSPVVVGTTDQRGIPTYTWGENVSDVFLLHSARPPLGAWFGCTWMNSSGFVKTCGAPPCRIKPTINETDLVCPTDCFRKHPDASFVKCGSGPWLTPRCMVDYPYRLWHYPCTVNFTIHKVRVFVGGVEHRFNAACNWTRGDRCELDDRDRFEMSPLLFSTTQLAILPCSFTTMPALSTGLIHLHQNIVDIQYLYGVSTAVVSWAMKWEYVVLAFLVLADARVCACLWLMFLVGQAEAALENVIVLNAASAASCQGLLWGLIFICCAWHVRGRAVPVTTYALLQLWPLLLLILALPRRAYAFDSEQAASAGLLVLGLITIFTLTPAYKQLLISMLWWIQYFIALTEAQLHQWVPSLLVRGGRDAVILLACLFHPQLGFEVTKILLALLGPLYLLQYSLLKTPYFVRAHILLRACMFFRGMARGRYAQAILLRIGAWTGTYIYDHLAPLSDWACDGLRDLAVAVEPVVFSPMEKKVITWGADTAACGDIIAGLPVAARRGNLLFLGPADDVKGKGWRLLAPITAYAQQTRGIVGTIVTSLTGRDKNEVEGEIQVVSTATQSFLATAVNGVLWTVYYGAGSKTLAGPKGPVCQMYTNVDQDLVGWPAPAGARSLTPCSCGSSDLYLVTRNADVIPARRRGDNRAALLSPRPISTLKGSSGGPMLCPSGHVAGIFRAAVCTRGVAKSLDFAPVESMQSSQRSPSFSDNTSPPAVPQTYQVGYLHAPTGSGKSTKVPAAYAAQGYKVLVLNPSVAATLGFGSYMSTSHGIDPNIRTGVRTITTGGAITYSTYGKFLADGGCSGGAYDVIICDECHSTDPTTVSGIGTVLDQAETSGVRLTVLATATPPGSVTVPHPNITESALPTTGEIPFYGKAVPLEYIKGGRHLIFCHPKKKCDELAKQLVSLGLNAVAFYRGVDVSVIPTSGDVVVCATDALMTGYTGDFDSVIDCNVTVTQVVDFSLDPTFTIETTTVPQDAVSRSQRRGRTGRGKHGVYRYVSQGERPSGMFDSVILCEAYDTGCAWYELTPAETTVRLRAYLNTPGLPVCQDHLEFWEGVFTGLTHIDAHFLSQTKQAEENFAYLVAYQATVCARAKAPPPSWDTMWKCLIRLKPMLTGPTPLLYRLGPVQNEVVTTHPITKYIMTCMSADLEVITSTWVLVGGVVAALAAYCLSVGCVVICGRISTSGKPVLIPDREVLYQQFDEMEECSRHIPYLAEGHLIAEQFKQKVLGLIQSTSKQAEELKPAVHAAWPKLEQFWQKQLWNFVSGIQYLAGLSTLPGNPAIASLMSFSASLTSPLSTHQTLLLNILGGWVASQLANPTASTAFVVSGLAGAAVGSIGLGRVIVDVLAGYGAGVSGALVAFKIMCGETPSAEDMVNLLPALLSPGALVVGVVCAAILRRHAGPSEGATQWMNRLIAFASRGNHVSPTHYVPETDTSRQIMTILSSLTVTSLLRKLHEWINTDWSTPCSSSWLRDIWDWVCEVLSDFKTWLKAKLVPALPGVPFLSCQRGFRGTWRGDGICHTTCPCGSEITGHVKNGTMKISGPRWCSNVSHRTFPINATTTGPSVPIPEPNYTRALWRVSAEEYVEVKRVGDSHFVVGATTDNLKCPCQVPAPEFFTEVDGVRLHRYAPRCKPLLRDEVSFSVGLSSYAVGSQLPCEPEPDVTVVTSMLIDPSHVTAEAAARRLARGSPPSLASSSASQLSAPSLKATCTMHGAHPDAELIEANLLWRQEMGGNITRVESENKVVILDSFDPLVPEFEEREMSVPAECHRPRRPKFPPALPIWATPGYNPPVLETWKSPTYEPPVVHGCALPPSGPPPIPPPRRKKVVQLDSSNVSAALAQLAAKTFETPSSPTTGYGSDQPDHSTESSEHDRDDGVASEAESYSSMPPLEGEPGDPDLSSGSWSTVSEEGDSVVCCSYSYSWTGALVTPCAAEEEKLPINPLSNSLIRHHNLVYSTSSRSAATRQKKVTFDRVQLLDQHYYDTVKEIKLRASHVKAQLLSTEEACDLTPPHSARSKFGYGAKDVRSHASKAINHINSVWADLLEDTQTPIPTTIMAKNEVFCVDASKGGRKSARLIVYPDLGVRVCEKRALFDVTRKLPTAIMGDAYGFQYSPQQRVDRLLKMWRSKKTPMGFSYDTRCFDSTVTERDIRTEQDIYLSCQLDPEARKVIESLTERLYVGGPMYNSKGQLCGQRRCRASGVLPTSMGNTVTCFLKATAACRAAGFTDYDMLVCGDDLVVVTESAGVNEDIANLRAFTEAMTRYSATPGDEPSPTYDLELITSCSSNVSVAHDGDGRRYYYLTRDPVTPLARAAWETARHTPVNSWLGNIIMYAPTIWVRMVLMTHFFQILQAQETLDRALDFDIYGVTYSITPLDLPVIIQRLHGMAAFSLHGYSPDELNRVASCLRKLGAPPLRAWRHRARAVRAKLIAQGGKAAVCGKYLFNWAIKTKLRLTPLRGASALDLSGWFTSGYGGGDVYHSASRARPRFLLLCLLLLSVGVGIFLLPAR

SEQ ID NO: 1754 - protein, 3013 aa, Artificial
  HCV
MSTLPKPQKRNQRNTNRRPQDVKFPGGGQIVGGVYLLPRRGPRLGVRATRKTSERSQPRGRRQPIPKARRQTGRTWAQPGYPWPLYGNEGCGWMGWLLSPRGSRPHWGPNDPRRRSRNLGKVIDTLTCGFADLMGYIPVVGAPLGGVAAALAHGVRAVEDGINYATGNLPGCSFSIFLLALLSCLTTPASAVHYANKSGIYHLTNDCPNSSIVYEAEDFIMHLPGCVPCIKSGNGSSCWLPATLTIAVPNASIPVRGFRRHVDLMVGAAAFCSAMYVGDLCGGIFLVGQLFSFNPRRHWVVQDCNCSIYVGHITGHRMAWDMMMNWSPTATLVLSYVMRIPQVIMDIFTGGHWGILAGILYYSMVANWAKVLCILFLFAGVDATTRTTGAQAARATLGFTGLFQTGAKQNIHLINTNGSWHINRTALNCNDSLNTGFMAALFYLHKFNSTGCPERLSACKSITQFAQGWGPVTYANVSGSSEDRPYCWHYAPRPCGVVSARSVCGPVYCFTPSPVVVGTTDRRGVPTYTWGENESDVFLLESLRPPAGAWYGCTWMNSTGYTKTCGAPPCHIGPPDQFCPTDCFRKHPEATYRKCGSGPWLTPRCLVDYPYRLWHYPCTVNYTIHKVRLFINGLEHRFDAACNWTRGERCELEDRDRIEMSPLLFSTTELAILPCSFTTMPALSTGLVHLHQNIVDIQYLYGLAPALVSWAVRWEYVVLAFLLLADARICACLWMVLLISQVEAALENLIVLNAASAASSQGWIYCLVFICCAWYIKGRVVPGATYAILHLWPLLLLVLALPQRAYAQDREQGASIGVVVIAAITIFTLTPAYKTMLVHFLWWNQYFIARSEALIQQWVPSLRVRGGRDAVILLTCLLHPSLGFDITKMLLALLGPLYLLQVSLLRVPYYVRAHALLRVCILVRRVAGGKYIQAALLKLGAWTGTYIYDHLAPLSTWASDGLRDLAVAVEPVTFSPMEKKIITWGADTAACGDILAGLPVSARLGHLLFLGPADDMKSMGWRLLAPITAYCQQTRGLLGTIVTSLTGRDRNVVEGEIQVLSTATQSFLGTAINGVMWTVYHGAGSKTLAGPKGPVCQMYTNVDQDMVGWPAPPGTRSLTPCTCGASDLYLVTRNADVIPARRRGDTRAGLLSPRPLSTLKGSSGGPLMCPSDHVVGLFRAAVCTRGVAKALDFVPVENMETTMRSPVFTDNSTPPAVPQTYQVGYLHAPTGSGKSTKVPAAYASQGYKVLVLNPSVAATLGFGSYMSTAHGIDPNIRTGVRTITTGGPITYSTYGKFLADGGCSGGAYDIIICDECHSTDPTTVLGIGTVLDQAETAGVRLTVLATATPPGSVTVPHPNITETALPSTGEVPFYGKAIPLECIKGGRHLIFCHSKKKCDELAKQLRTLGLNAVAFYRGVDVSVIPTAGDVVVCATDALMTGYTGDFDSVIDCNVAVTQIVDFSLDPTFSIETTTVPQDAVARSQRRGRTGRGKPGVYRYVSQGERPSGMFDTVVLCEAYDVGCAWYELTPSETTVRLRAYLNTPGLPVCQDHLEFWEGVFTGMTHIDAHFLSQTKQGGENFAYLVAYQATVCARAKAPPPSWDTMWKCLIRLKPMLTGPTPLLYRLGAVQNEIITTHPITKYIMTCMAADLEVITSTWVLAGGIVAALAAYCLTVGSVVICGRIVTSGKPVPLPDREVLYRQFDEMEECSRHIPYLAEGQQIAEQFKQKILGLLQNTAKQAEDLKPAVQSAWPKLEQFWQKHLWNFVSGVQYLAGLSTLPGNPAVASLMSFSAALTSPLSTSTTLLLNILGGWVASQLAPPTASTAFVVSGLAGAAVGSIGLGKVIIDILAGYGAGVSGALVAFKIMSGEAPAVEDMVNLLPALLSPGALVVGVVCAAVLRRHVGPSEGATQWMNRLIAFASRGNHVSPTHYVPETDASRAVTTILSSLTITSLLRRLHEWISGDWSAPCSCSWLKDVWDWVCTVLSDFKTWLRAKLVPTLPGIPFISCQRGFRGVWRGDGVNYTTCSCGANITGHVKNGSMKIVGPKMCSNVWNNRFPINAITTGPSVPVPEPNYHKALWRVSAEDYVEVVRVNDHHYIVGATADNLKCPCQVPAPEFFTEVDGVRLHRFAPPCRPLMRDDITFSVGLSTYVVGSQLPCEPEPDVVILTSMLTDPDHITAETAARRLARGSPPSLASSSASQLSAPSLKATCTTAGKHPDAELIEANLLWRQEVGGNITRVESENKIIVLDSFDPLIAETDDREISVGAECFNPPRPKFPPALPVWARPDYNPPLLQPWKAPDYEPPLVHGCALPPKGLPPVPPPRKKRVVQLDEGSAKRALAELAQTSFPPSTATLSEDSGRETSTLSSDMTPPREEADRASDDGSYSSMPPLEGEPGDPDLSSGSWSTVSEDHDSVVCCSMSYSWTGALITPCAAEEEKLPISPLSNALIRHHNLVYSTTSRSASLRQKKVTFDRVQVVDQHYYDVLKEIKTKASGVSAKLLSVEEACALTPPHSARSKFGYGAKEVRGLASKAVNHINSVWEDLLEDNSTPIPTTIMAKNEVFCVDAQKGGRKPARLIVYPDLGVRVCEKRALYDVTQKLPIAVMGAAYGFQYSPKQRVDYLLKMWRSKKTPMGFSYDTRCFDSTVTERDIRTEEDIYQCCQLDPVAKKAITSLTERLYCGGPMYNSRGQSCGYRRCRASGVLTTSLGNTLTCYLKAQAACRAAKLKDFDMLVCGDDLVVISESMGVAEDASALRAFTEAMTRYSAPPGDDPQPEYDLELITSCSSNVSVAHDGAGQRYYYLTRDPLTPLSRAAWETARHTPVNSWLGNIIMYAPTIWVRMVLMTHFFAILQSQEILHKALDFDMYGVTYSVTPLDLPYIIQRLHGMAAFSLHGYSPGELNRVASCLRKLGAPPLRAWRHRARAVRAKLIAQGGKHAICGKYLFNWAVRTKLKLTPLRGAANLDLSGWFVSGGSGGDIFHSVSRARPRNLLLCLLLLTVGVGIFLLPAR

SEQ ID NO: 1755 - protein, 3016 aa, Artificial
  HCV
MSTLPKPQRKTKRNTNRRPMDVKFPGGGQIVGGVYLLPRRGPRLGVRATRKTSERSQPRGRRQPIPKARQSQGRHWAQPGYPWPLYGNEGCGWAGWLLSPRGSRPNWGPNDPRRRSRNLGKVIDTLTCGFADLMGYIPVVGAPLGGVAAALAHGVRAIEDGINYATGNLPGCSFSIFLLALLSCLTTPASAVHYRNISGIYHLTNDCPNSSIIYEADNIIMHTPGCVPCVKTGNKSQCWVPVAPTLAVANASVPIRGFRSHVDLLVGSAAACSALYIGDLCGGVFLVGQLFTFRPRQHTTVQECNCSIYTGHITGHRMAWDMMMNWSPTVTFITSSLLRVPQLLLEIALEGHWGVIGALLYYSMVANWAKVFAVLLLFAGVDATTHIGSSASATTNRLTSFFSPGSKQNVQLIKTNGSWHINRTALNCNDSLHTGFIAGLLYAHRFNSSGCPERLSSCRPLHAFEQGWGPLTYANISGPSNDKPYCWHYPPRPCDIVPARSVCGPVYCFTPSPVVVGTTDRKGLPTYTWGANESDVFLLRSTRPPRGSWFGCTWMNSTGFVKTCGAPPCNTRPVGSGNDTLVCPTDCFRKHPEATYARCGSGPWLTPRCLVNYPYRLWHYPCTVNYTIHKVRMFVGGIEHRFEAACNWTRGERCELDDRDRVEMSPLLFSTTQLSILPCSFTTMPALSTGLIHLHQNIVDVQYLYGVSSAVVSWAVKWEYIVLAFLVLAVARVCACLWLMFLVGQAEAALENLIVLNATSAAGSQGWVWGVVFICAAWYIRGRAAPITTYAILQLWPLLLLVLALPRRAYAYNGEEAASLGMLAIVIITIFTLTPAYKTLLISTLWWIQYYIARAEAMLYVWVPSLQVRGGRDAVILLTCLLHPQLGFEVTKAILALLGPLYILQYSLLKTPYFVRAHILLRVCMFLRGVAGGKYVQAALLRLGAWTGTYIYDHLTPLSDWACDGLRDLAVAVEPVVFSPMEKKVITWGADTVACGDIISGLPVSARRGNLIFLGPADDIRDGGWRLLAPITAYAQQTRGLVGTIVTSLTGRDKNEVEGEIQVVSTATQSFLATTVNGVLWTVYHGAGSKTLAGPKGPICQMYTNVDQDLVGWPAPPGARSLTPCTCGSSDLYLVTRNADVIPARRRGDTRAALLSPRPISTLKGSSGGPMLCPSGHVAGIFRAAVCTRGVAKSLDFVPVENMQSTARSPSFSDNTTPPAVPQTYQVGYLHAPTGSGKSTKVPAAYAAQGYKVLVLNPSVAATLGFGSYMSTAHGIDPNIRTGVRTITTGGAITYSTYGKFLADGGCSGGAYDIIICDECHSTDPTTVLGIGTVLDQAETAGVRLTVLATATPPGSVTVPHPNITEVALSSTGEVPFYGKAIPLEYIKGGRHLIFCHSKKKCDELAKQLTSLGLNAVAFYRGVDVSVIPTSGDVVVCATDALMTGYTGDFDSVIDCNVSVTQVVDFSLDPTFTIETTTMPQDAVSRSQRRGRTGRGKHGVYRYVSQGERPSGIFDTVVLCEAYDTGCAWYELTPSETTVRLRAYLNTPGLPVCQDHLEFWEGVFTGLTHIDAHLLSQTKQGGENFAYLVAYQATVCARAKAPPPSWDTMWKCLIRLKPMLTGPTPLLYRLGAVQNEITTTHPITKYIMTCMSADLEVITSTWVLVGGVLAALAAYCLSVGCVVVCGRISTTGKPVLIPDREVLYQQFDEMEECSRHIPYLVEGQHLAEQFKQKVLGLIQTTTRQAEEIEPVVHSAWPKLEQFWQKHLWNFVSGIQYLAGLSTLPGNPAVASLMSFSASLTSPLSTSTTLLLNILGGWVASQLANPTASTAFVVSGLAGATVGSIGLGRVLVDIIAGYGAGVSGALVAFKIMSGETPSAEDMVNLLPALLSPGALVVGVVCAAILRRHAGPAEGATQWMNRLIAFASRGNHVSPTHYVPETDTSRQVMAILSSLTVTSLLRKLHEWINSDWSTPCSGSWLRDIWDWVCTVLSDFKVWLKSKLVPALPGVPFLSCQRGFRGVWRGDGICRTTCPCGADIVGHVKNGSMRISGSRWCSNIWHGTFPINATTTGPSVPIPEPNYKRALWRVSAEEYVEVARVGDSHFVVGATNQDLKCPCQVPAPEFFTEVDGVRLHRFAPACKPLLRDEISFLVGLNSYAIGSQLPCEPEPDVTVVTSMLVDPSHLTAEAAARRLARGSPPSCASSLASQLSAPSLKATCTTHCAHPDADLIEANLLWRQEVGGNITRVESENKVIVLDSFDPLVPEYDDREPSVPAECHRPNRPKFPPALPIWARPDYNPPLLETWKKPDYAPPLVHGCALPSPVQPPVPPPRRKSVVHLDDSTVATALAELAEKSFPTQPASTPDSDSGHPTTSKSSDQADEGEDTPSEAGSYSSMPPLEGEPGDPDLSSGSWSTVSEEGDSVVCCSMSYSWTGALVTPCAAEEEKLPINPLSNSLIRHHNLVYSTTTRSAAMRQKKVTFDRLQILDQHYNNVVKEVKLRASGVTAKLLSVEEACSLTPPHSARSKFGYGAKDVRSHTSKAINHINSVWEDLLEDNQTPIPTTIMAKNEVFCADVSKGGRKPARLIVYPDLGVRVCEKRALYDVTRKLPTAIMGDAYGFQYSPKQRVDQLLKMWRSKKTPMGFSYDTRCFDSTVTEHDIKTERDVYLSCKLDPVARKAIESLTERLYIGGPMYNSRGQLCGTRRCRASGVLTTSLGNTMTCFIKAEAACRAAGLTNYDMLVCGDDLVVIAESAGVQEDASNLRAFTEAMTRYSAPPGDEPHPAYDLELITSCSSNVSVAHDHTGQRYYYLTRDPTTPLSRAAWETARHTPVNSWLGNIIMYAPAIWVRMVLMTHFFQILQAQEQLDKVLDFDMYGVTYSVSPLQLPAIIQRLHGMAAFSLHGYSPTELNRVGACLRKLGAPPLRAWRHRARAVRAKLIAQGGGAAICGKYLFNWAVKTKLKLTPIPDAARLDLSGWFISGFSGGDIYHSVSRARPRIFLLCLLLLSVGVGIFLLPAR

SEQ ID NO: 1756 - protein, 9 aa, Human Immunodeficiency Virus
KLTPLCVTL

SEQ ID NO: 1757 - protein, 9 aa, Artificial
  Mutant HIV
KITPLCVTL

SEQ ID NO: 1758 - protein, 9 aa, Artificial
  Mutant HIV
KMTPLCVTL

SEQ ID NO: 1759 - protein, 9 aa, Artificial
  Mutant HIV
KLTPLCVTM

SEQ ID NO: 1760 - protein, 9 aa, Artificial
  Mutant HIV
RLTPLCVTL

SEQ ID NO: 1761 - protein, 9 aa, Artificial
  Mutant HIV
QLTPLCVTL

SEQ ID NO: 1762 - protein, 9 aa, Artificial
  Mutant HIV
ELTPLCVTL

SEQ ID NO: 1763 - protein, 9 aa, Artificial
  Mutant HIV
KLTFLCVTL

SEQ ID NO: 1764 - protein, 9 aa, Artificial
  Mutant HIV
KLTSLCVTL

SEQ ID NO: 1765 - protein, 9 aa, Artificial
  Mutant HIV
KLTQLCVTL

SEQ ID NO: 1766 - protein, 9 aa, Artificial
  Mutant HIV
KLTPFCVTL

SEQ ID NO: 1767 - protein, 9 aa, Artificial
  Mutant HIV
KLTPRCVTL

SEQ ID NO: 1768 - protein, 9 aa, Artificial
  Mutant HIV
KLTPLCITL

SEQ ID NO: 1769 - protein, 9 aa, Artificial
  Mutant HIV
KLTPLCVPL

SEQ ID NO: 1770 - protein, 9 aa, Artificial
  Mutant HIV
KLTPLCVSL

SEQ ID NO: 1771 - protein, 9 aa, Artificial
  Mutant HIV
KLTPLCVAL

SEQ ID NO: 1772 - protein, 9 aa, Artificial
  Mutant HIV
KLTPLCVIL

SEQ ID NO: 1773 - protein, 9 aa, Artificial
  Mutant HIV
QITPLCVTL

SEQ ID NO: 1774 - protein, 9 aa, Artificial
  Mutant HIV
QMTFLCVQM

SEQ ID NO: 1775 - protein, 9 aa, Artificial
  Mutant HIV
KMTFLCVQM

SEQ ID NO: 1776 - protein, 9 aa, Human Immunodeficiency Virus
VLAEAMSQV

SEQ ID NO: 1777 - protein, 9 aa, Artificial
  Mutant HIV
VLAEAMSQA

SEQ ID NO: 1778 - protein, 9 aa, Artificial
  Mutant HIV
VLAEAMSQT

SEQ ID NO: 1779 - protein, 9 aa, Artificial
  Mutant HIV
VLAEAMSQI

SEQ ID NO: 1780 - protein, 9 aa, Artificial
  Mutant HIV
ILAEAMSQV

SEQ ID NO: 1781 - protein, 9 aa, Artificial
  Mutant HIV
VLAEAMGQV

SEQ ID NO: 1782 - protein, 9 aa, Artificial
  Mutant HIV
VLAEAMSRV

SEQ ID NO: 1783 - protein, 9 aa, Artificial
  Mutant HIV
VLAEAMSKV

SEQ ID NO: 1784 - protein, 9 aa, Artificial
  Mutant HIV
VLAEAMSHV

SEQ ID NO: 1785 - protein, 9 aa, Artificial
  Mutant HIV
ALAEAMSQA

SEQ ID NO: 1786 - protein, 9 aa, Artificial
  Mutant HIV
ILAEAMSQA

SEQ ID NO: 1787 - protein, 9 aa, Artificial
  Mutant HIV
VLGEAMSQA

SEQ ID NO: 1788 - protein, 9 aa, Artificial
  Mutant HIV
VLAEAMSKA

SEQ ID NO: 1789 - protein, 9 aa, Artificial
  Mutant HIV
VLAEAMSRA

SEQ ID NO: 1790 - protein, 9 aa, Artificial
  Mutant HIV
VLAEAMSHA

SEQ ID NO: 1791 - protein, 9 aa, Artificial
  Mutant HIV
VLAEAMSHT

SEQ ID NO: 1792 - protein, 9 aa, Artificial
  Mutant HIV
VLAEAMSAA

SEQ ID NO: 1793 - protein, 9 aa, Artificial
  Mutant HIV
VLAEAMATA

SEQ ID NO: 1794 - protein, 9 aa, Artificial
  Mutant HIV
VLAEAMAAA

SEQ ID NO: 1795 - protein, 9 aa, Artificial
  Mutant HIV
ILAEAMSKA

SEQ ID NO: 1796 - protein, 9 aa, Artificial
  Mutant HIV
ILAEAMASA

SEQ ID NO: 1797 - protein, 9 aa, Human Immunodeficiency Virus
RILQQLLFI

SEQ ID NO: 1798 - protein, 9 aa, Artificial
  Mutant HIV
RLLQQLLFI

SEQ ID NO: 1799 - protein, 9 aa, Artificial
  Mutant HIV
RTLQQLLFI

SEQ ID NO: 1800 - protein, 9 aa, Artificial
  Mutant HIV
RMLQQLLFI

SEQ ID NO: 1801 - protein, 9 aa, Artificial
  Mutant HIV
RVLQQLLFI

SEQ ID NO: 1802 - protein, 9 aa, Artificial
  Mutant HIV
RILQQLLFV

SEQ ID NO: 1803 - protein, 9 aa, Artificial
  Mutant HIV
RILQQLLFT

SEQ ID NO: 1804 - protein, 9 aa, Artificial
  Mutant HIV
RILQQLLFA

SEQ ID NO: 1805 - protein, 9 aa, Artificial
  Mutant HIV
KILQQLLFI

SEQ ID NO: 1806 - protein, 9 aa, Artificial
  Mutant HIV
TILQQLLFI

SEQ ID NO: 1807 - protein, 9 aa, Artificial
  Mutant HIV
RILQQMLFI

SEQ ID NO: 1808 - protein, 9 aa, Artificial
  Mutant HIV
RILQQPLFI

SEQ ID NO: 1809 - protein, 9 aa, Artificial
  Mutant HIV
RILQQLLLI

SEQ ID NO: 1810 - protein, 9 aa, Artificial
  Mutant HIV
RVLQQLLFV

SEQ ID NO: 1811 - protein, 9 aa, Artificial
  Mutant HIV
RMLQQLLFV

SEQ ID NO: 1812 - protein, 9 aa, Artificial
  Mutant HIV
RMLQQLLFT

SEQ ID NO: 1813 - protein, 9 aa, Artificial
  Mutant HIV
RTLQQLLFA

SEQ ID NO: 1814 - protein, 9 aa, Artificial
  Mutant HIV
RTLQQLLFT

SEQ ID NO: 1815 - protein, 9 aa, Artificial
  Mutant HIV
RTLQQLLFV

SEQ ID NO: 1816 - protein, 9 aa, Artificial
  Mutant HIV
RTLQQLMFI

SEQ ID NO: 1817 - protein, 9 aa, Artificial
  Mutant HIV
RMLQHLLFI

SEQ ID NO: 1818 - protein, 9 aa, Artificial
  Mutant HIV
RILQHLLFA

SEQ ID NO: 1819 - protein, 9 aa, Artificial
  Mutant HIV
RILQRLLFV

SEQ ID NO: 1820 - protein, 9 aa, Artificial
  Mutant HIV
RTLQLLLFV

SEQ ID NO: 1821 - protein, 10 aa, Human Immunodeficiency Virus
VTIKIGGQLK

SEQ ID NO: 1822 - protein, 10 aa, Artificial
  Mutant HIV
VAIKIGGQLK

SEQ ID NO: 1823 - protein, 10 aa, Artificial
  Mutant HIV
VTIKIGGQLR

SEQ ID NO: 1824 - protein, 10 aa, Artificial
  Mutant HIV
VTVKIGGQLK

SEQ ID NO: 1825 - protein, 10 aa, Artificial
  Mutant HIV
VTIRIGGQLK

SEQ ID NO: 1826 - protein, 10 aa, Artificial
  Mutant HIV
VTIKVGGQLK

SEQ ID NO: 1827 - protein, 10 aa, Artificial
  Mutant HIV
VTIKIEGQLK

SEQ ID NO: 1828 - protein, 10 aa, Artificial
  Mutant HIV
VTIKIGGQIK

SEQ ID NO: 1829 - protein, 10 aa, Artificial
  Mutant HIV
VTVKIGGQLR

SEQ ID NO: 1830 - protein, 10 aa, Artificial
  Mutant HIV
VTVKIGGELK

SEQ ID NO: 1831 - protein, 10 aa, Artificial
  Mutant HIV
VTVKIEGQLK

SEQ ID NO: 1832 - protein, 10 aa, Artificial
  Mutant HIV
VTVKVGGQLK

SEQ ID NO: 1833 - protein, 10 aa, Artificial
  Mutant HIV
VTVRIGGQLK

SEQ ID NO: 1834 - protein, 10 aa, Artificial
  Mutant HIV
VTIRIGGQLR

SEQ ID NO: 1835 - protein, 10 aa, Artificial
  Mutant HIV
VTIRVGGQLK

SEQ ID NO: 1836 - protein, 10 aa, Artificial
  Mutant HIV
VAIKIGGQIK

SEQ ID NO: 1837 - protein, 10 aa, Artificial
  Mutant HIV
VNIKVGGQLK

SEQ ID NO: 1838 - protein, 10 aa, Artificial
  Mutant HIV
VTIKIGGQIR

SEQ ID NO: 1839 - protein, 10 aa, Artificial
  Mutant HIV
VTIKLGGQIR

SEQ ID NO: 1840 - protein, 10 aa, Artificial
  Mutant HIV
VTVKIEGQLR

SEQ ID NO: 1841 - protein, 10 aa, Artificial
  Mutant HIV
VTVKVGGQLR

SEQ ID NO: 1842 - protein, 10 aa, Artificial
  Mutant HIV
VTIRVGGQLR

SEQ ID NO: 1843 - protein, 10 aa, Artificial
  Mutant HIV
VSIKVGGQIK

SEQ ID NO: 1844 - protein, 10 aa, Artificial
  Mutant HIV
VTVRVGGQLK

SEQ ID NO: 1845 - protein, 10 aa, Artificial
  Mutant HIV
VTIRVAGQVK

SEQ ID NO: 1846 - protein, 10 aa, Artificial
  Mutant HIV
VSIRVGGQTK

SEQ ID NO: 1847 - protein, 10 aa, Artificial
  Mutant HIV
VSIRVGGQIK

SEQ ID NO: 1848 - protein, 10 aa, Artificial
  Mutant HIV
VSIKVGGQIR

SEQ ID NO: 1849 - protein, 10 aa, Artificial
  Mutant HIV
VTVRIGGMQK

SEQ ID NO: 1850 - protein, 10 aa, Artificial
  Mutant HIV
VSIRVGGQTR

SEQ ID NO: 1851 - protein, 10 aa, Artificial
  Mutant HIV
ITVKIGKEVR

SEQ ID NO: 1852 - protein, 11 aa, Human Immunodeficiency Virus
VTVYYGVPVWK

SEQ ID NO: 1853 - protein, 11 aa, Artificial
  Mutant HIV
VTVYYGVPVWR

SEQ ID NO: 1854 - protein, 11 aa, Artificial
  Mutant HIV
VTIYYGVPVWK

SEQ ID NO: 1855 - protein, 11 aa, Artificial
  Mutant HIV
VTVYDGVPVWK

SEQ ID NO: 1856 - protein, 11 aa, Artificial
  Mutant HIV
VTVYYGVPIWK

SEQ ID NO: 1857 - protein, 11 aa, Artificial
  Mutant HIV
ITVYYGVPVWR

SEQ ID NO: 1858 - protein, 11 aa, Artificial
  Mutant HIV
VTIYYGVPVWR

SEQ ID NO: 1859 - protein, 11 aa, Artificial
  Mutant HIV
VTVYDGVPVWR

SEQ ID NO: 1860 - protein, 11 aa, Artificial
  Mutant HIV
VTVYYGIPVWR

SEQ ID NO: 1861 - protein, 11 aa, Artificial
  Mutant HIV
VTVYYGVPVRR

SEQ ID NO: 1862 - protein, 9 aa, Artificial
  Gag 386 variant
VLAEAMSQV

SEQ ID NO: 1863 - protein, 9 aa, Artificial
  Gag 386 variant
VLAEAMSQI

SEQ ID NO: 1864 - protein, 9 aa, Artificial
  Gag 386 variant
VLAEAMSQA

SEQ ID NO: 1865 - protein, 9 aa, Artificial
  Gag 386 variant
VLAEAMSKV

SEQ ID NO: 1866 - protein, 9 aa, Artificial
  Gag 386 variant
VLAEAMAAA

SEQ ID NO: 1867 - protein, 9 aa, Artificial
  Gag 386 variant
ILAEAMSQA

SEQ ID NO: 1868 - protein, 9 aa, Artificial
  Gag 386 variant
VLAEAMSKA

SEQ ID NO: 1869 - protein, 9 aa, Artificial
  Gag 386 variant
ILAEAMSKA

SEQ ID NO: 1870 - protein, 9 aa, Artificial
  Env 134 variant
KLTPLCVTL

SEQ ID NO: 1871 - protein, 9 aa, Artificial
  Env 134 variant
KLTPLCVPL

SEQ ID NO: 1872 - protein, 9 aa, Artificial
  Env 134 variant
KLTPLCVIL

SEQ ID NO: 1873 - protein, 9 aa, Artificial
  Env 134 variant
KLTPFCVTL

SEQ ID NO: 1874 - protein, 9 aa, Artificial
  Env 134 variant
KITPLCVTL

SEQ ID NO: 1875 - protein, 9 aa, Artificial
  Env 134 variant
ELTPLCVTL

SEQ ID NO: 1876 - protein, 9 aa, Artificial
  Env 134 variant
QLTPLCVTL

SEQ ID NO: 1877 - protein, 9 aa, Artificial
  Env 134 variant
QITPLCVTL

SEQ ID NO: 1878 - protein, 10 aa, Artificial
  Pol 98 Variant
VTIKIGGQLK

SEQ ID NO: 1879 - protein, 10 aa, Artificial
  Pol 98 Variant
VTIKIGGQLR

SEQ ID NO: 1880 - protein, 10 aa, Artificial
  Pol 98 Variant
VAIKIGGQLK

SEQ ID NO: 1881 - protein, 10 aa, Artificial
  Pol 98 Variant
VTIKIGGQIK

SEQ ID NO: 1882 - protein, 10 aa, Artificial
  Pol 98 Variant
VTIKIEGQLK

SEQ ID NO: 1883 - protein, 10 aa, Artificial
  Pol 98 Variant
VTIKVGGQLK

SEQ ID NO: 1884 - protein, 10 aa, Artificial
  Pol 98 Variant
VTIRIGGQLK

SEQ ID NO: 1885 - protein, 10 aa, Artificial
  Pol 98 Variant
VTVKIGGQLK

SEQ ID NO: 1886 - protein, 10 aa, Artificial
  Pol 98 Variant
VTVKIGGQLR

SEQ ID NO: 1887 - protein, 10 aa, Artificial
  Pol 98 Variant
VTVKIGGELK

SEQ ID NO: 1888 - protein, 10 aa, Artificial
  Pol 98 Variant
VTVKIEGQLK

SEQ ID NO: 1889 - protein, 10 aa, Artificial
  Pol 98 Variant
VTVKVGGQLK

SEQ ID NO: 1890 - protein, 10 aa, Artificial
  Pol 98 Variant
VTVRIGGQLK

SEQ ID NO: 1891 - protein, 10 aa, Artificial
  Pol 98 Variant
VTIRIGGQLR

SEQ ID NO: 1892 - protein, 10 aa, Artificial
  Pol 98 Variant
VTIRIGGQLR

SEQ ID NO: 1893 - protein, 10 aa, Artificial
  Pol 98 Variant
VTIRVGGQLK

SEQ ID NO: 1894 - protein, 10 aa, Artificial
  Pol 98 Variant
VAIKIGGQIK

SEQ ID NO: 1895 - protein, 10 aa, Artificial
  Pol 98 Variant
VNIKVGGQLK

SEQ ID NO: 1896 - protein, 10 aa, Artificial
  Pol 98 Variant
VTIKIGGQIR

SEQ ID NO: 1897 - protein, 10 aa, Artificial
  Pol 98 Variant
VTIKLGGQIR

SEQ ID NO: 1898 - protein, 10 aa, Artificial
  Pol 98 Variant
VTVKIEGQLR

SEQ ID NO: 1899 - protein, 10 aa, Artificial
  Pol 98 Variant
VTVKVGGQLR

SEQ ID NO: 1900 - protein, 10 aa, Artificial
  Pol 98 Variant
VTIRVGGQLR

SEQ ID NO: 1901 - protein, 10 aa, Artificial
  Pol 98 Variant
VSIKVGGQIK

SEQ ID NO: 1902 - protein, 10 aa, Artificial
  Pol 98 Variant
VTVRVGGQLK

SEQ ID NO: 1903 - protein, 10 aa, Artificial
  Pol 98 Variant
VTIRVAGQVK

SEQ ID NO: 1904 - protein, 10 aa, Artificial
  Pol 98 Variant
VSIRVGGQTK

SEQ ID NO: 1905 - protein, 10 aa, Artificial
  Pol 98 Variant
VSIRVGGQIK

SEQ ID NO: 1906 - protein, 10 aa, Artificial
  Pol 98 Variant
VSIKVGGQIR

SEQ ID NO: 1907 - protein, 10 aa, Artificial
  Pol 98 Variant
VTVRIGGMQK

SEQ ID NO: 1908 - protein, 10 aa, Artificial
  Pol 98 Variant
VSIRVGGQTR

SEQ ID NO: 1909 - protein, 10 aa, Artificial
  Pol 98 Variant
ITVKIGKEVR

SEQ ID NO: 1910 - protein, 11 aa, Artificial
  Env 47 variant
VTVYYGVPVWK

SEQ ID NO: 1911 - protein, 11 aa, Artificial
  Env 47 variant
VTVYYGVPVWR

SEQ ID NO: 1912 - protein, 11 aa, Artificial
  Env 47 variant
VTVYYGVPIWK

SEQ ID NO: 1913 - protein, 11 aa, Artificial
  Env 47 variant
VTVYDGVPVWK

SEQ ID NO: 1914 - protein, 11 aa, Artificial
  Env 47 variant
VTIYYGVPVWK

SEQ ID NO: 1915 - protein, 11 aa, Artificial
  Env 47 variant
VTVYYGVPVRR

SEQ ID NO: 1916 - protein, 11 aa, Artificial
  Env 47 variant
VTVYYGIPVWR

SEQ ID NO: 1917 - protein, 11 aa, Artificial
  Env 47 variant
VTVYDGVPVWR

SEQ ID NO: 1918 - protein, 11 aa, Artificial
  Env 47 variant
VTIYYGVPVWR

SEQ ID NO: 1919 - protein, 11 aa, Artificial
  Env 47 variant
ITVYYGVPVWR

SEQ ID NO: 1920 - protein, 9 aa, Artificial
  Mutant HIV
MTSNPPIPV

SEQ ID NO: 1921 - protein, 9 aa, Artificial
  Mutant HIV
MTNNPPIPV

SEQ ID NO: 1922 - protein, 9 aa, Artificial
  Mutant HIV
MTSNPPVPV

SEQ ID NO: 1923 - protein, 9 aa, Artificial
  Mutant HIV
MTGNPPIPV

SEQ ID NO: 1924 - protein, 9 aa, Artificial
  Mutant HIV
MTGNPPVPV

SEQ ID NO: 1925 - protein, 9 aa, Artificial
  Mutant HIV
MTNNPPVPV

SEQ ID NO: 1926 - protein, 9 aa, Artificial
  Mutant HIV
MTANPPVPV

SEQ ID NO: 1927 - protein, 9 aa, Artificial
  Mutant HIV
MTHNPPIPV

SEQ ID NO: 1928 - protein, 9 aa, Artificial
  Mutant HIV
MTANPPIPV

SEQ ID NO: 1929 - protein, 9 aa, Artificial
  Mutant HIV
MTSDPPIPV

SEQ ID NO: 1930 - protein, 9 aa, Artificial
  Mutant HIV
MTGNPSIPV

SEQ ID NO: 1931 - protein, 9 aa, Artificial
  Mutant HIV
MTGNPAIPV

SEQ ID NO: 1932 - protein, 9 aa, Artificial
  Mutant HIV
MTSNPAIPV

SEQ ID NO: 1933 - protein, 9 aa, Artificial
  Mutant HIV
MTRNPPVPV

SEQ ID NO: 1934 - DNA, 834 bp, Artificial
  HIV Fusion Construct
atgggaatgcaggtgcagatccagagcctgtttctgctcctcctgtgggtgcccggatccagaggaaagctggtgggcaaactcaactgggccggagctgcaatcctgaaggagcccgtccacggggtgaatgccgcttgccctaaagtcagcttcgaaccaattaagatccccattcattactgtgcacctgccaaagctaagtttgtggccgcttggaccctcaaggccgctgcaaaagccttcccagtgaggccccaggtgcctctgggcgccgctaaactcacaccactgtgcgtcactctgggagccgctgcagtgctggcagaggccatgtcccaagtgaaggtgtatctggcttgggtgcccgcccacaagggggccgctgcagccatctttcagtctagcatgaccaagaaaacaactctgttctgtgcctccgacgctaagaacatcccttataatccacagtctcagggcgtggtcaagcatcccgtgcacgccggacctattgctaacgtgaccgtgtactatggggtcccagtgtggaagaaagccgctgcacagatggccgtgtttattcacaatttcaaaaacgccgctgcataccccctcgccagcctgagatccctcttcaacctgacattcggctggtgctttaagctgaaccggatcctgcagcaactgctctttatcaatgctaaaatccagaacttccgcgtctactataggaaggctgcagtgactatcaaaattggcggacaactgaagaaagtgcctctccagctgccccctctcaaggcaatgaccaacaatccccctatcccagtctga

SEQ ID NO: 1935 - protein, 277 aa, Artificial
  HIV Fusion Construct
MGMQVQIQSLFLLLLWVPGSRGKLVGKLNWAGAAILKEPVHGVNAACPKVSFEPIKIPIHYCAPAKAKFVAAWTLKAAAKAFPVRPQVPLGAAKLTPLCVTLGAAAVLAEAMSQVKVYLAWVPAHKGAAAAIFQSSMTKKTTLFCASDAKNIPYNPQSQGVVKHPVHAGPIANVTVYYGVPVWKKAAAQMAVFIHNFKNAAAYPLASLRSLFNLTFGWCFKLNRILQQLLFINAKIQNFRVYYRKAAVTIKIGGQLKKVPLQLPPLKAMTNNPPIPV

SEQ ID NO: 1936 - DNA, 2235 bp, Artificial
  HBV GCR-3697 Fusion Construct
atgggcatgcaggtgcagatccagagcctgttcctgctcctgctgtgggtgccaggaagcagaggctttctcctgtccctgggcatccacctgaacgccgctgcaaagtacaccagcttcccctggctgctcaacgccgctgcccggttcagctggctgtccctgctcgtgcccttcaacgcagccttcccccactgcctggccttcagctacatgaaagcagccctggtggtcgacttctcccagttcagccggggagccatcctgctcctgtgcctgatctttctgctcaacgccgctgcccacaccctgtggaaggctggcatcctgtacaagaaagcctggatgatgtggtactggggacccagcctgtacaaggcatatccagccctgatgcccctgtacgcctgcatcggagctgccgcatggctgagcctcctggtgcccttcgtgaacgccgctgccgggttcctgctgacaagaatcctgaccatcaacgccgcagccattcctatcccctccagctgggccttcaaggcagccgccgagtacctggtgagcttcggagtctggaacctgcccagcgacttctttcccagcgtgaaagccgcagccttcctgccctccgacttctttcccagcgtgaaggccgcagccgatctcctggacaccgctagcgccctgtacaacagctggcccaagttcgccgtgcccaacctgaaggccgcagccagcgccatctgcagcgtggtcagacggaagctgtccctcgatgtgagcgccgctttctacaacgccgccgcaaagttcgtggccgcctggaccctgaaagccgctgccaaggcagccaacgtgagcatcccctggacccacaaaggagccgcaggactgagccggtatgtggccagactgaacgccgctgccagcaccctgcccgagaccacagtggtcagacggaagcaccccgccgccatgccccacctgctgaaggccgcagcccggtggatgtgcctcagacggttcatcatcaacgcttccttctgtggcagcccctacaaggccgcctacatggatgacgtggtcctgggagtgaacgccctctggttccacatcagctgcctgaccttcaaagccgctgccacacccgcaagagtgaccggaggcgtgttcaaggctgcagccctgaccttcggccgggagaccgtgctggagtacaagcaggccttcaccttcagccccacctacaagaacgccggcaccagctttgtgtacgtcccaagcgccctgaatcccgcagacggccccggccccggactgtgccaggtgttcgccgatgccacaccaaccggatggggcctgggccctggacccggcagacactacctgcataccctgtggaaggcaggaatcctgtacaaaggccccggccctggaccccatcacaccgctctgcggcaggccatcctgtgctggggcgagctcatgactctggcaggacccggccccggcgaatccaggctggtggtggactttagccagttctccagaggcaacggacccggcccaggacccttcctgctcgcccagttcaccagcgccatctgcagcgtggtcggacctggcccaggactggtgcccttcgtgcagtggttcgtcggcctcagccccaccgtcggacctggccccggcctgcacctctacagccaccctatcattctgggcttcagaaagatcggaccaggccccggctccagcaacctgtcctggctcagcctggacgtcagcgcagccttcggacccggccctggcctgcagagcctgaccaacctgctcagcagcaacctcagctggctgggcccaggacccggcgcaggcttctttctgctcaccagaatcctgaccatccctcagagcggccccggaccaggcgtgagcttcggcgtgtggattcggactcctcccgcctacagacccccaaatgcccccatcggcccaggacccggcgtcggacctctgactgtgaacgagaagcggagactgaagctgatcggccccggaccaggcaaacagtgcttcaggaagctccctgtgaacagacctatcgactggggccccggacccggcgcagccaactggattctgagaggcaccagcttcgtgtacgtccctggacccggccctggcaagcaagccttcaccttcagccccacctacaaggcattcctgtgcggatag

SEQ ID NO: 1937 - protein, 744 aa, Artificial
  HBV GCR-3697 Fusion Construct
MGMQVQIQSLFLLLLWVPGSRGFLLSLGIHLNAAAKYTSFPWLLNAAARFSWLSLLVPFNAAFPHCLAFSYMKAALVVDFSQFSRGAILLLCLIFLLNAAAHTLWKAGILYKKAWMMWYWGPSLYKAYPALMPLYACIGAAAWLSLLVPFVNAAAGFLLTRILTINAAAIPIPSSWAFKAAAEYLVSFGVWNLPSDFFPSVKAAAFLPSDFFPSVKAAADLLDTASALYNSWPKFAVPNLKAAASAICSVVRRKLSLDVSAAFYNAAAKFVAAWTLKAAAKAANVSIPWTHKGAAGLSRYVARLNAAASTLPETTVVRRKHPAAMPHLLKAAARWMCLRRFIINASFCGSPYKAAYMDDVVLGVNALWFHISCLTFKAAATPARVTGGVFKAAALTFGRETVLEYKQAFTFSPTYKNAGTSFVYVPSALNPADGPGPGLCQVFADATPTGWGLGPGPGRHYLHTLWKAGILYKGPGPGPHHTALRQAILCWGELMTLAGPGPGESRLVVDFSQFSRGNGPGPGPFLLAQFTSAICSVVGPGPGLVPFVQWFVGLSPTVGPGPGLHLYSHPIILGFRKIGPGPGSSNLSWLSLDVSAAFGPGPGLQSLTNLLSSNLSWLGPGPGAGFFLLTRILTIPQSGPGPGVSFGVWIRTPPAYRPPNAPIGPGPGVGPLTVNEKRRLKLIGPGPGKQCFRKLPVNRPIDWGPGPGAANWILRGTSFVYVPGPGPGKQAFTFSPTYKAFLCG

SEQ ID NO: 1938 - DNA, 660 bp, Artificial
  HBV AOSIb2 Fusion Construct
atgggaatgcaggtgcagatccagagcctgtttctgctcctcctgtgggtgcccgggtccagaggacacaccctgtggaaggccggaatcctgtataaggccaagttcgtggctgcctggaccctgaaggctgccgctttcctgcctagcgatttctttcctagcgtgaacttcctgctgtccctgggaatccacctgtatatggatgacgtggtgctgggagtgggactgtccaggtacgtggctaggctgttcctgctgaccagaatcctgaccatctccaccctgccagagaccaccgtggtgaggaggcaggccttcacctttagccctacctataagggagccgctgcctggctgagcctgctggtgccctttgtgaatatccctatccctagctcctgggctttcaagaccccagccagggtgaccggaggagtgtttaaggtgggaaacttcaccggcctgtataacctgcccagcgatttctttcctagcgtgaagaccctgtggaaggccggaatcctgtacaagaatgtgtccatcccttggacccacaagggagccgctctggtggtggacttttcccagttcagcagaaattccgctatctgctccgtggtgaggagagctctgatgccactgtatgcctgtatctga

SEQ ID NO: 1939 - protein, 219 aa, Artificial
  HBV AOSIb2 Fusion Construct
MGMQVQIQSLFLLLLWVPGSRGHTLWKAGILYKAKFVAAWTLKAAAFLPSDFFPSVNFLLSLGIHLYMDDVVLGVGLSRYVARLFLLTRILTISTLPETTVVRRQAFTFSPTYKGAAAWLSLLVPFVNIPIPSSWAFKTPARVTGGVFKVGNFTGLYNLPSDFFPSVKTLWKAGILYKNVSIPWTHKGAALVVDFSQFSRNSAICSVVRRALMPLYACI

SEQ ID NO: 1940 - protein, 307 aa, Artificial
  HCV Fusion Construct
MGMQVQIQSLFLLLLWVPGSRGRLGVRATRKKAAAKTSERSQPRNLPGCSFSIFNDLMGYIPLVKYLLPRRGPRLNTLCGFADLMGYRMYVGGVEHRKLLFNILGGWVKAAALADGGCSGGAYRLIVFPDLGVKFWAKHMWNFIGVAGALVAFKKQLFTFSPRRNGYLVAYQATVAAALLFLLLADALIFCHSKKKYLVTRHADVLGFGAYMSKCTCGSSDLYHMWNFISGIFWAKHMWNFKKAAAVLVGGVLAAAFLLLADARVLSAFSLHSYILAGYGAGVWMNRLAFANAAAKFVAAWTLKAAA

SEQ ID NO: 1941 - DNA, 948 bp, Artificial
  HCV Fusion Construct
gaattcgccgccaccatgggaatgcaggtgcagatccaaagcctgtttctgctcctcctgtgggtgcccggctccagaggaaggctgggcgtgagagccacccggaagaaggctgccgctaaaacaagcgagcgctcccagcccaggaacctgcctggatgctctttcagcatctttaatgacctcatggggtacattccactggtgaagtatctgctccccagacggggccctcgcctgaacactctctgtggatttgctgatctgatggggtacaggatgtatgtcggcggagtcgaacacagaaaactgctcttcaacatcctgggcggatgggtgaaggctgccgctctggccgacgggggatgcagcggcggagcttacaggctcattgtctttcccgatctcggagtcaaattttgggcaaagcacatgtggaatttcatcggggtggccggagccctggtcgcttttaaaaagcagctcttcaccttctccccaagacggaacggatacctcgtcgcctaccaggccactgtggctgcagctctgctcttcctgctcctggccgatgcactcatcttctgccattccaagaaaaagtatctggtcaccagacatgctgacgtgctggggtttggcgcctacatgagcaagtgcacctgtggcagctccgacctgtatcacatgtggaactttatttctggaatcttttgggccaagcacatgtggaattttaagaaagccgctgcagtcctggtgggcggcgtcctggcagccgctttcctgctcctggcagacgccagggtgctgtctgccttcagcctccactcctacatcctcgcagggtatggcgcaggcgtgtggatgaatcggctgatcgcctttgccaatgctgcagctaaattcgtggcagcctggacactgaaagcagctgcatgaggatcc

SEQ ID NO: 1942 - protein, 418 aa, Artificial
  Pf33 Construct
MGMQVQIQSLFLLLLWVPGSRGFMKAVCVEVNVTCGNGIQVRKGLIMVLSFLNAALFHIFDGDNEIKAALLACAGLAYKKSFLFVEALFNAAPSDGKCNLYKAAQTNFKSLLRNLPSENERGYKAAGVSENIFLKNAAAYFILVNLLIKAAAILSVSSFLFVNTPYAGEPAPFKAAAKYKLATSVLKAAVFLIFFDLFLNYYIPHQSSLKAAGLLGNVSTVGAVLLGGVGLVLNLACAGLAYKKAKFIKSLFHIFKAAFYFILVNLLKAFLIFDLFLVKALFFIIFNKNYYGKQENWYSLKFVEALFQEYNAAAKFVAAWTLKAAAKILSVFFLANAVLAGLLGNVNFQDEENIGIYKAAALYISFYFIKAFILVNLLIFHNAALPYGRTNLKAAHVLSHNSYEKNAAAKYLVIVFLI

SEQ ID NO: 1943 - DNA, 1269 bp, Artificial
  Pf33 Construct
gccgccaccatgggaatgcaggtgcagatccagagcctgtttctgctcctcctgtgggtgcccggatccagaggatttatgaaagctgtctgtgtagaggtgaatgtaacatgcggtaacggaattcaggtgagaaagggactcatcatggtactcagctttctgaacgcagccctgttccacatctttgacggagacaatgaaatcaaagccgcattgctcgcctgtgccggactagcctataaaaagagtttccttttcgttgaagcactatttaacgcagcacccagtgacggtaaatgcaacctatataaagcagctcagactaatttcaaaagcctgttaagaaatctgccctcagagaatgaaaggggttacaaagccgccggcgtgtccgagaatattttcctgaagaacgccgctgcttattttatactcgtgaatctactcataaaggcagccgcaatcctttcagtgtccagctttctgtttgttaacacaccatatgcgggcgagccggctcctttcaaggctgcagcaaaatacaagcttgccacatcagtattgaaagcagctgtgtttttgatattctttgatctttttttaaactactacatacctcatcagtctagtcttaaagcagccgggctactggggaacgtctctactgtgggggccgtcttacttggaggagttggcctcgtgttgaacctcgcgtgcgcaggtctggcctacaaaaaagcgaaattcatcaagtctctgttccacatttttaaagccgcattctatttcatactagtgaaccttctcaaagctttcctgatcttcttcgatctattcctcgtaaaagcgctattcttcattatctttaacaaaaattattacggcaagcaagaaaattggtactcactcaagtttgtagaagctctgttccaggaatacaacgccgctgctaaattcgttgcagcttggaccctgaaagcagctgcaaagatcctatcggtcttctttctcgctaatgccgtattagcaggacttctaggcaacgtgaactttcaagacgaagagaatataggcatctacaaagccgcagcactgtacatttcattctacttcatcaaggccttcatactggtcaaccttctgatatttcataatgcagcactgccatatgggagaaccaacttgaaagcggcccacgtgttgagccacaactcctacgagaagaacgccgccgcgaaatatctcgtcattgtcttcctgatttga

SEQ ID NO: 1944 - protein, 180 aa, Artificial
  TB.1
MQVQIQSLFLLLLWVPGSRGRMSRVTTFTVKALVLLMLPVVNLMIGTAAAVVKALVLLMLPVGAGLMTAVYLVGAAAMALLRLPVKRMFAANLGVNSLYFGGICVGRLPLVLPAVNAAAAKFVAAWTLKAAAKAAARLMIGTAAAGFVVALIPLVNAMTYAAPLFVGAAAAMALLRLPLV

SEQ ID NO: 1945 - DNA, 543 bp, Artificial
  TB.1
atgcaggtgcagatccagagcctgtttctgctcctcctgtgggtgcccggatccagaggaaggatgagcagagtgaccacattcactgtcaaggccctggtgctcctgatgctccccgtcgtgaacctgatgatcggcaccgctgcagccgtcgtgaaagctctcgtcctgctcatgctccctgtgggagcagggctgatgacagccgtgtacctggtcggcgctgcagccatggccctcctgcggctgccagtgaagcgcatgtttgctgcaaatctgggagtcaactccctctatttcgggggcatttgcgtgggaaggctgcccctcgtgctgcctgctgtgaatgcagccgctgccaaatttgtcgccgcttggactctgaaggcagccgctaaggccgctgcaagactgatgatcgggaccgccgctgccggcttcgtggtcgccctgattcccctggtgaacgccatgacatacgcagctcctctgtttgtgggagccgctgcagccatggctctcctgcggctgccactggtgtga

SEQ ID NO: 1946 - protein, 212 aa, Artificial
  HBV Core Protein
MQLFHLCLIISCSCPTVQASKLCLGWLWGMDIDPYKEFGATVELLSFLPSDFFPSVRDLLDTASALYREALESPEHCSPHHTALRQAILCWGELMTLATWVGVNLEDPASRDLVVSYVNTNMGLKFRQLLWFHISCLTFGRETVIEYLVSFGVWIRTPPAYRPPNAPILSTLPETTVVRRRGRSPRRRTPSPRRRRSQSPRRRRSQSRESQC

1. A method for identifying a candidate peptide epitope which induces a HLA class I CTL response against variants of said peptide epitope, comprising
a) identifying, from a particular antigen of an infectious agent, variants of a peptide epitope 8-11 amino acids in length, each variant comprising primary anchor residues of the same HLA class I binding motif; and
b) determining whether one of said variants comprises only conserved non-anchor residues in comparison to at least one remaining variant, thereby identifying a candidate peptide epitope.

2. A method for identifying a candidate peptide epitope which induces a HLA class I CTL response against variants of said peptide epitope, comprising
a) identifying, from a particular antigen of an infectious agent, variants of a peptide epitope 8-11 amino acids in length, each variant comprising primary anchor residues of the same HLA class I binding motif;
b) determining whether each of said variants comprises conserved, semi-conserved or non-conserved non-anchor residues in comparison to each of the remaining variants; and
c) identifying a variant which comprises only conserved non-anchor residues in comparison to at least one remaining variant.

3. A method for identifying a candidate peptide epitope which induces a HLA class I CTL response against variants of said peptide epitope, comprising
a) identifying, from a particular antigen of an infectious agent, a population of variants of a peptide epitope 8-11 amino acids in length, each peptide epitope comprising primary anchor residues of the same HLA class I binding motif;
b) choosing a variant selected from the group consisting of:
i) a variant which comprises preferred primary anchor residues of said motif; and
ii) a variant which occurs with high frequency within the population of variants; and
c) determining whether the variant of (b) comprises only conserved non-anchor residues in comparison to at least one remaining variant, thereby identifying a candidate peptide epitope.

4. A method for identifying a candidate peptide epitope which induces a HLA class I CTL response against variants of said peptide epitope, comprising
a) identifying, from a particular antigen of an infectious agent, a population of variants of a peptide epitope 8-11 amino acids in length, each peptide epitope comprising primary anchor residues of the same HLA class I binding motif;
b) choosing a variant selected from the group consisting of:
i) a variant which comprises preferred primary anchor residues of said motif; and
ii) a variant which occurs with high frequency within the population of variants; and
c) determining whether the variant of (b) comprises conserved, semi-conserved or non-conserved non-anchor residues in comparison to each of the remaining variants; and
d) identifying a variant which comprises only conserved non-anchor residues in comparison to at least one remaining variant.

5. The method of claim 1, wherein (b) comprises identifying a variant which comprises only conserved non-anchor residues in comparison to at least 25%, at least 50%, at least 75%, at least 80%, at least 85%, at least 90%, at least 95%, at least 97%, or at least 99% of the remaining variants.

6. The method of claim 2, wherein (c) comprises identifying a variant which comprises only conservative non-anchor residues in comparison to at least 25%, at least 50%, at least 75%, at least 80%, at least 85%, at least 90%, at least 95%, at least 97%, or at least 99% of the remaining variants.

7. The method of claim 4, wherein (d) comprises identifying a variant which comprises only conservative non-anchor residues in comparison to at least 25%, at least 50%, at least 75%, at least 80%, at least 85%, at least 90%, at least 95%, at least 97%, or at least 99% of the remaining variants.

8-15. (canceled)

16. The method of claim 1, wherein the infectious agent is selected from the group consisting of: HIV, HBV, HCV, HPV, Plasmodium falciparum, Influenza virus, Dengue virus, Epstein-Barr virus, Mycobacterium tuberculosis, Chlamydia, Candida albicans, Cryptococcus neoformans, Coccidoides spp., Histoplasma spp, Aspergillus fumigatis, Plasmodium spp., Trypanosoma spp., Schistosoma spp., and Leishmania spp.

17-22. (canceled)

23. The method of claim 1, wherein the selected variant and the at least one remaining variant comprise different primary anchor residues of the same motif or supermotif.

24-25. (canceled)

26. The method of claim 1, wherein the variant comprises only 1-3 conserved non-anchor residues compared to at least one remaining variant.

27-30. (canceled)

31. The method of claim 3, wherein (c) comprises identifying a variant which comprises only conservative non-anchor residues in comparison to at least 25%, at least 50%, at least 75%, at least 80%, at least 85%, at least 90%, at least 95%, at least 97%, or at least 99% of the remaining variants.

32. The method of claim 2, wherein the infectious agent is selected from the group consisting of: HIV, HBV, HCV, HPV, Plasmodium falciparum, Influenza virus, Dengue virus, Epstein-Barr virus, Mycobacterium tuberculosis, Chlamydia, Candida albicans, Cryptococcus neoformans, Coccidoides spp., Histoplasma spp, Aspergillus fumigatis, Plasmodium spp., Trypanosoma spp., Schistosoma spp., and Leishmania spp.

33. The method of claim 3, wherein the infectious agent is selected from the group consisting of: HIV, HBV, HCV, HPV, Plasmodium falciparum, Influenza virus, Dengue virus, Epstein-Barr virus, Mycobacterium tuberculosis, Chlamydia, Candida albicans, Cryptococcus neoformans, Coccidoides spp., Histoplasma spp, Aspergillus fumigatis, Plasmodium spp., Trypanosoma spp., Schistosoma spp., and Leishmania spp.

34. The method of claim 4, wherein the infectious agent is selected from the group consisting of: HIV, HBV, HCV, HPV, Plasmodium falciparum, Influenza virus, Dengue virus, Epstein-Barr virus, Mycobacterium tuberculosis, Chlamydia, Candida albicans, Cryptococcus neoformans, Coccidoides spp., Histoplasma spp, Aspergillus fumigatis, Plasmodium spp., Trypanosoma spp., Schistosoma spp., and Leishmania spp.

35. The method of claim 2, wherein the selected variant and the at least one remaining variant comprise different primary anchor residues of the same motif or supermotif.

36. The method of claim 3, wherein the selected variant and the at least one remaining variant comprise different primary anchor residues of the same motif or supermotif.

37. The method of claim 4, wherein the selected variant and the at least one remaining variant comprise different primary anchor residues of the same motif or supermotif.

38. The method of claim 2, wherein the variant comprises only 1-3 conserved non-anchor residues compared to at least one remaining variant.

39. The method of claim 3, wherein the variant comprises only 1-3 conserved non-anchor residues compared to at least one remaining variant.

40. The method of claim 4, wherein the variant comprises only 1-3 conserved non-anchor residues compared to at least one remaining variant.
